(19) United States
(12) Patent Application Publication
(10) Pub. No.: US 2002/0155564 A1
(43) Pub. Date: Oct. 24, 2002

(54) Cloning of a high growth gene

(75) Inventors: Juan F. Medrano, Davis, CA (US); Eric Bradford, Davis, CA (US); Simon Horvat, Edinburgh (GB)

Correspondence Address: Tom Hunter, SKJERVEN MORRILL MacPHERSON LLP, Suite700, 25 Metro Drive, San Jose, CA, 95110-1349, US

(73) Assignee: The Regents of the University of California

(21) Appl. No.: 09/771,208

(22) Filed: Jan. 26, 2001

Related U.S. Application Data
(63) Continuation-in-part of application No. 08/999,477, filed on Dec. 29, 1997.

(51) Int. Cl. A01K 67/027; C07H 21/04; C12N 9/99; C12P 21/02; C12N 5/06

(52) U.S. Cl. 435/184; 800/14; 435/69.2; 435/320.1; 435/325; 536/23.2

(57) ABSTRACT

This invention pertains to the discovery of a gene, reduced expression of which results in a high growth (hg) phenotype. This invention pertains to knockout animals displaying such a high growth phenotype and to methods of screening for agents that modulate a high growth phenotype.

### CROSS-REFERENCE TO RELATED APPLICATIONS

[0001] This non-provisional application is filed under 37 C.F.R. § 1.53(b) as a continuation-in-part of co-pending U.S. patent application Ser. No. 08/999,477, filed Dec. 29, 1997, which is incorporated herein by reference in its entirety for all purposes.

### STATEMENT AS TO RIGHTS TO INVENTIONS MADE UNDER FEDERALLY SPONSORED RESEARCH AND DEVELOPMENT

[0002] This invention was made with the Government support under Grant Nos. HD 00394 and HD 07205, awarded by the National Institutes of Health and Grant No. 92-37205-7840 awarded by the United States Department of Agriculture. The Government of the United States of America may have certain rights in this invention.

### FIELD OF THE INVENTION

[0003] This invention generally relates to modifying growth in animals (e.g. domestic animals), and more particularly to oligonucleotide probes useful to isolate genomic clones so as to improve growth performance and efficiency in domestic animals, such as by knocking out loci related to the control of growth or utilizing identified growth quantitative trait loci in marker-assisted selection programs with animals. The invention identifies genes that are in the pathways of apoptosis and signal transduction within cells, which are directly or indirectly involved in the processes of cell proliferation, cell growth and cell death and can be utilize to alter growth in mammals.

### BACKGROUND OF THE INVENTION

[0004] In animals, many different hormones (e.g. growth hormone, sex steroids) are known to have an important function in maintaining normal animal growth and to be effective growth promoters when administered exogenously (see, e.g. Kopchick (1991) Livestock Prod. Sci., 27:66-75). Some transgenic animals have been caused to express a growth hormone, and increased growth of such transgenic animals has been reported. Palmiter et al., (1982) Nature, 300:611-615, 1982) microinjected the male pronucleus of fertilized mouse eggs with a DNA fragment containing the promoter of the mouse metallothionein-I gene fused to the structural gene of rat growth hormone. Several of the transgenic mice developed from the genetically modified zygote exhibited a growth rate substantially higher than that of control mice. Palmiter et al. (1983)Science, 222:809-814, demonstrated that a similar enhancement of growth could be obtained in transgenic mice bearing an expressible human growth hormone gene. A like effect is observed when human growth hormone releasing factor is expressed in transgenic mice (Hammer et al. (1985) Nature, 315:413-416,. Bovine growth hormone has also been expressed in transgenic animals (McGrane et al. (1988) J. Biol. Chem., 15 263:11443-51; Kopchick et al. (1989) Brazil. J. Genetics, 12:37-54).

[0005] U.S. Pat. No. 5,350,836 (Kopchick et al., issued Sep. 27, 1994) entitled “Growth Hormone Antagonists,” describes administration of a protein that has growth-inhibitory activity in vertebrates and may be administered to mammals, such as bovines, when growth inhibition is desirable. Alternatively, a gene coding for the hormone is suggested for introduction into a prenatal form of a mammal to produce growth-inhibited animals.

[0006] A recent article discusses the biological function of a transforming growth factor β superfamily member and suggests it as a potentially useful target for genetic manipulation in cattle and other farm animals. This new member is called myostatin (“GDF-8”) and functions as a negative regulator of skeletal muscle growth. It was initially studied in gene knockout experiments in mice, followed by a report of the myostatin sequences of nine other vertebrate species and the identification of mutation in double-muscled cattle (McPherron et al. (1997) Nature, 387:83-90; McPherron and Lee (1997) Proc. Natl. Acad. Sci., USA, 94:12457-12461). In mice, myostatin knockouts were significantly larger than normal mice and showed a large increase in muscle mass. In Belgian Blue cattle a small deletion of eleven nucleotides and in Piedmontese cattle a single base pair mutation in the myostatin gene produced myostatin null animals having a characteristic increase in muscle mass known as “double muscling.”

[0007] A high growth, mutant mouse with unusually rapid weight gain is also known (Bradford and Famula (1984) Genet. Res., 44:293-308). The mutation was reported to be a segment of DNA located in mouse chromosome 10 that was deleted. (Medrano et al. (1991) Genet. Res., 58: 67-74, 1991; Medrano et al. (1992) The high growth gene (hg) in mice is located on chromosome 10 linked to Igfl. Advances in gene technology: Feeding the world in the 21st century, ” edited by W. J. Whelan et al., The 1992 Miami Bio/Technology Winter Symposium, 1:12; Horvat and Medrano (1995) Genetics, 139: 1737-1748; Horvat and Medrano (1996) Genomics, 36: 546-549) The region of mouse chromosome 10 where the high growth gene was localized is homologous to a region in human chromosome 12, cattle and pig chromosome 5, sheep chromosome 3 and chicken chromosome 1. The high growth mouse phenotype features of interest are: a 30-50% increase in growth of tissues and organs, but where growth does not result in obesity; an increase in the efficiency of conversion of feed to muscle mass; decreased growth hormone levels in pituitary and plasma; an elevated plasma level of insulin growth factor-1; and, an increased muscle mass due primarily to an increase in muscle fiber number (i.e., hyperplasia) and a moderate fiber hypertrophy.

[0008] Control of growth for higher organisms has a number of applications. For example, with domestic species the characterization of the gene or genes causing high growth phenotype should offer new ways to improve growth performance and efficiency. In some human growth disorders, it has been suggested that as yet unknown genetic factor(s) may be at work (Jones (1994) Growth Genetics and Hormones, 10: 6-10). A marker closely linked to a growth disorder would be useful in diagnosis and genetic counseling. In human medicine the development of a treatment to suppress or enhance growth in specific tissues and organs would be useful in certain disesease states.

### SUMMARY OF THE INVENTION

[0009] In one aspect of the present invention, an isolated nucleic acid molecule is provided that encodes a gene product which, is knocked-out in high growth mice. For example, a mouse cDNA is provided which is highly homologous to genes of various species, such as mouse, bovine, chicken and human. The mouse cDNA is shown as SEQ ID NO:1, which corresponds to the murine Raidd/Cradd gene. The present invention provides for cloning of this gene and biologically active fragments thereof, as well as preparation of oligonucleotide probes, or primers. These are useful in identifying molecules and pathways of growth regulation so as to improve animal growth and to design diagnostic and treatment strategies for growth disorders, and to develop genetic markers. In another aspect of the present invention, characterizing causal molecular defects in mouse models of overgrowth or dwarfism helps to identify the key genes and pathways that regulate the growth process. This invention reports the molecular basis for high growth (hg), a spontaneous mutation that causes a 30-50% increase in postnatal growth. This invention concludes that hg is an allele of the suppressor of cytokine signaling 2 (Socs2), a member of a family of regulators of cytokine signal transduction. This invention demonstrates mapping of Socs2 to the hg region, lack of Socs2 mRNA expression, a disruption of the Socs2 locus in high growth (hg) mice and a similarity of phenotypes of hg mice and Socs2^{-/-} mice generated by gene targeting. Characteristics of the hg phenotype indicate that Socs2 deficiency affects growth prenatally and postnatally most likely through deregulating the growth hormone (GH)/insulin-like growth factor I (IGF1). These results demonstrate a critical role for Socs2 in controlling growth.

[0010] Thus, in one embodiment, this invention provides an isolated nucleic acid (e.g. DNA, RNA, etc.) molecule encoding a gene product (e.g. mRNA, protein, etc.) that, when knocked out, results in a high growth (hg) phenotype. In a particularly preferred embodiment, the nucleic acid comprises a socs2 nucleotide sequence (e.g. the nucleotide sequence of SEQ ID NO9) or the complement thereof. In certain embodiments, the nucleic acid is labeled (e.g. with a detectable label) or unlabeled and can, optionally be present in an expression cassette and/or a vector (e.g. plasmid, BAC, P1 clone, cosmid, phagemid, etc.).

[0011] In another embodiment this invention provides a cell (e.g. a mammalian cell) transfected with a nucleic acid molecule encoding a gene product that, when knocked out, results in a high growth (hg) phenotype. The cell can be stably or transiently transfected. In particularly preferred embodiments, the cell transcribes an mRNA and/or expresses a polypeptide encoded by the transfected nucleic acid.

[0012] In still another embodiment, this invention provides methods of producing an animal characterized by a high growth (hg) phenotype. The disruption can be by a variety of methods including, but not limited to antisense molecules, knockout constructs, RNAi, catalytic DNAs, small organic molecules, and the like. The methods preferably involve inhibiting expression (e.g. transcription and/or translation, and/or activity) of a Socs2 gene or gene product. In particularly preferred embodiments, the disruption is by disrupting the by homologous recombination with a nucleic acid (“knockout construct”) that undergoes homologous recombination with a Socs2 gene and introduces a disruption in the Socs2 gene. Preferred knockout constructs encode one or more selectable markers (e.g. hyg, neo, etc.).

[0013] In certain embodiments, this invention provides knockout mammals (e.g., equine, a bovine, a rodent, a porcine, a lagomorph, a feline, a canine, a murine, a caprine, an ovine, and a non-human primate) comprising cells containing a recombinantly introduced disruption in a Socs2 gene, where the disruption results in the knockout mammal exhibiting decreased levels of SOCS2 protein as compared to a wild-type mammal (e.g. a mammal lacking the knockout). Preferred knockout mammals of this invention display a high growth (hg) phenotype. Preferred disruptions include, but are not limited to an insertion, a deletion, a frameshift mutation, a substitution, a stop codon, and the like. In particularly preferred embodiments, the disruption comprises an insertion of an expression cassette into the endogenous Socs2 gene. Particularly preferred expression cassettes comprise a selectable marker (e.g. a neo gene, a hyg gene, etc.) operably linked to at least one regulatory element (e.g a promoter). In certain knockout mammals of this invention, the disruption is in a somatic cell. In certain knockout mammals of this invention, the disruption is in a reproductive (e.g germ) cell. The mammal can be homozygous or heterozygous for the disrupted Socs2 gene. The knockout mammals of this invention can further comprise a second recombinantly disrupted gene (e.g a disruption that prevents the expression of a functional polypeptide from the disrupted second gene). The mammal can be heterozygous or homozygous for the second disrupted gene.

[0014] In still another embodiment, this invention provides methods of screening for an agent that modulates expression of a high growth (hg) phenotype. Preferred methods involve contacting a cell comprising a Socs2 gene with a test agent; and detecting a change in the expression or activity of a Socs2 gene product (e.g mRNA, polypeptide) as compared to the expression or activity of a Socs2 gene product in a cell that is contacted with the test agent at a lower concentration (e.g. 50% test agent, no test agent, etc.) , where a difference in the expression or activity of Socs2 in the contacted cell and the cell that is contacted with the lower concentration indicates that said agent modulates expression or is likely to modulate expression of a high growth (hg) phenotype. In preferred embodiments, the Socs2 gene product is detected by detecting Socs2 mRNA in said sample, e.g the mRNA to a probe that specifically hybridizes to a Socs2 nucleic acid. In preferred hybridization methods, the hybridizing is according to a method selected from the group consisting of a Northern blot, a Southern blot using DNA derived from the Lpin1 RNA, an array hybridization, an affinity chromatography, and an in situ hybridization. In certain embodiments, the probe is a member of a plurality of probes that forms an array of probes. In certain embodiments, the Socs2 mRNA is measured using a nucleic acid amplification reaction. In another embodiment, the Socs2 gene product is detected by detecting the level of a Socs2 protein in the biological sample, e.g. via a method such as capillary electrophoresis, a Western blot, mass spectroscopy, ELISA, immunochromatography, or immunohistochemistry. In certain embodiments, the cell is a cell cultured ex vivo. In other embodiments, the cell is in vivo (e.g. the test agent is contacted to an animal comprising a cell containing the Socs2 nucleic acid or the Socs2 protein). . In preferred embodiments, the test agent is not an antibody, and/or not a protein, and/or not a nucleic acid, and/or not an antisense molecule. Particularly preferred test agents include small organic molecules.

[0015] In still another embodiment, this invention provides methods of prescreening for an agent that alters the expression of a high growth phenotype. These methods preferably involve contacting a Socs2 nucleic acid or a Socs2 protein with a test agent; and detecting specific binding of the test agent to the Socs2 protein or nucleic acid. The methods can further comprise recording (the identity) fo test agents that specifically bind to the Socs2 nucleic acid or protein in a database of candidate agents that alter hg phenotype development. In preferred embodiments, the test agent is not an antibody, and/or not a protein, and/or not a nucleic acid, and/or not an antisense molecule. Particularly preferred test agents include small organic molecules. In certain embodiments, the detecting comprises detecting specific binding of the test agent to a Socs2 nucleic acid (e.g via Northern blot, Southern blot using DNA derived from a Socs2 RNA, an array hybridization, an affinity chromatography, an in situ hybridization, etc.). In certain embodiments, the detecting comprises detecting specific binding of said test agent to a Socs2 protein or fragment thereof (e.g. via capillary electrophoresis, Western blot, mass spectroscopy, ELISA, immunochromatography, immunohistochemistry, etc.). The test agent is contacted directly to the Socs2 nucleic acid or to the Socs2 protein or the test agent is contacted to a cell containing the Socs2 protein. The cell can be ex vivo (e.g in culture) or in vivo (e.g, the test agent is contacted to an animal comprising a cell containing the Socs2 nucleic acid or the Socs2 protein).

[0016] In still another embodiment, this invention provides an isolated nucleic acid comprising a nucleic acid selected from the group consisting of: a nucleic acid that specifically hybridizes to a nucleic acid selected from the group consisting of SEQ ID NO:2, and SEQ ID NO: 9 under stringent conditions; nucleic acid comprising a nucleic acid sequence selected from the group consisting of SEQ ID NO:2, and SEQ ID NO: 9. In certain embodiments, the nucleic acid is at least 10, preferably at least 15, more preferably at least 20, most preferably at least 25, 50, or 100 nucleotides in length.

[0017] Also provided are polypeptides encoded by these nucleic acids of fragments (e.g. immunogenic fragments) of such polypeptides. Antibodies (e.g. polyclonal, monoclonal, single chain, etc.) are also provided that specifically bind to such polypeptides or polypeptide fragments.

[0018] In still another embodiments, this invention provides a nucleic acid (e.g., a “knockout construct”) for disrupting a SOCS2 gene (Socs2). Preferred nucleic acids comprise said nucleic acid comprising SOCS2 gene sequences that undergo homologous recombination with an endogenous Socs2 gene: and a nucleic acid sequence that, when introduced into a Socs2 gene inhibits the expression (transcription and/or translation of the Socs2 gene or activity of the Socs2 polypeptide) SOCS2 gene. Particularly preferred nucleic acids , when introduced into a Socs2 gene create a disruption such as an insertion, a deletion, a frameshift mutation, or a stop codon. The disruption can comprise the insertion of an expression cassette into the endogenous Socs2 gene. Preferred expression cassettes comprise a selectable marker (e.g. neo, hyg, etc.). The nucleic acid (knockout construct) can comprise Socs2 nucleic acid sequences flanking a nucleic acid encoding a Socs2 disruption and, optionally, is present in a vector.

[0019] In still another embodiment, this invention provides an animal cell (e.g. mammal cell) comprising a recombinantly introduced disruption (e.g as described above) in an endogenous Socs2 gene (Socs2) where the disruption results in the cell exhibiting decreased levels of Socs2 protein as compared to a wild-type (e.g. unmodified) cell. Preferred cells include, but are not limted to cells from chicken, turkey, duck, goose, equine, bovine, rodent, porcine, lagomorph, feline, canine, murine, caprine, ovine, non-human primate, and the like. Particularly preferred cells include rodent cells.

### DEFINITIONS

[0020] The terms “polypeptide”, “peptide” and “protein” are used interchangeably herein to refer to a polymer of amino acid residues. The terms apply to amino acid polymers in which one or more amino acid residues is an artificial chemical analogue of a corresponding naturally occurring amino acid, as well as to naturally occurring amino acid polymers. The term also includes variants on the traditional peptide linkage joining the amino acids making up the polypeptide.

[0021] The terms “nucleic acid” or “oligonucleotide” or grammatical equivalents herein refer to at least two nucleotides covalently linked together. A nucleic acid of the present invention is preferably single-stranded or double stranded and will generally contain phosphodiester bonds, although in some cases, as outlined below, nucleic acid analogs are included that may have alternate backbones, comprising, for example, phosphoramide (Beaucage et al. (1993) Tetrahedron 49(10):1925) and references therein; Letsinger (1970) J. Org. Chem. 35:3800; Sprinzl et al. (1977) Eur. J. Biochem. 81: 579; Letsinger et al. (1986) Nucl. Acids Res. 14: 3487; Sawai et al. (1984) Chem. Lett. 805, Letsinger et al. (1988) J. Am. Chem. Soc. 110: 4470; and Pauwels et al. (1986) Chemica Scripta 26: 1419), phosphorothioate (Mag et al. (1991) Nucleic Acids Res. 19:1437; and U.S. Pat. No. 5,644,048), phosphorodithioate (Briu et al. (1989) J. Am. Chem. Soc. 111 :2321, O-methylphosphoroamidite linkages (see Eckstein, Oligonucleotides and Analogues: A Practical Approach, Oxford University Press), and peptide nucleic acid backbones and linkages (see Egholm (1992) J. Am. Chem. Soc. 114:1895; Meier et al. (1992) Chem. Int. Ed. Engl. 31: 1008; Nielsen (1993) Nature, 365: 566; Carlsson et al. (1996) Nature 380: 207). Other analog nucleic acids include those with positive backbones (Denpcy et al. (1995) Proc. Natl. Acad. Sci. USA 92: 6097; non-ionic backbones (U.S. Pat. Nos. 5,386,023, 5,637,684, 5,602,240, 5,216,141 and 4,469,863; Angew. (1991) Chem. Intl. Ed. English 30: 423; Letsinger et al. (1988) J. Am. Chem. Soc. 110:4470; Letsinger et al. (1994) Nucleoside & Nucleotide 13:1597; Chapters 2 and 3, ASC Symposium Series 580, “Carbohydrate Modifications in Antisense Research”, Ed. Y. S. Sanghui and P. Dan Cook; Mesmaeker et al. (1994), Bioorganic & Medicinal Chem. Lett. 4: 395; Jeffs et al. (1994) J. Biomolecular NMR 34:17; Tetrahedron Lett. 37:743 (1996)) and non-ribose backbones, including those described in U.S. Pat. Nos. 5,235,033 and 5,034,506, and Chapters 6 and 7, ASC Symposium Series 580, Carbohydrate Modifications in Antisense Research, Ed. Y. S. Sanghui and P. Dan Cook. Nucleic acids containing one or more carbocyclic sugars are also included within the definition of nucleic acids (see Jenkins et al. (1995), Chem. Soc. Rev. pp169-176). Several nucleic acid analogs are described in Rawls, C & E News Jun. 2, 1997 page 35. These modifications of the ribose-phosphate backbone may be done to facilitate the addition of additional moieties such as labels, or to increase the stability and half-life of such molecules in physiological environments.

[0022] The term “heterologous” as it relates to nucleic acid sequences such as coding sequences and control sequences, denotes sequences that are not normally associated with a region of a recombinant construct, and/or are not normally associated with a particular cell. Thus, a “heterologous” region of a nucleic acid construct is an identifiable segment of nucleic acid within or attached to another nucleic acid molecule that is not found in association with the other molecule in nature. For example, a heterologous region of a construct could include a coding sequence flanked by sequences not found in association with the coding sequence in nature. Another example of a heterologous coding sequence is a construct where the coding sequence itself is not found in nature (e.g., synthetic sequences having codons different from the native gene). Similarly, a host cell transformed with a construct which is not normally present in the host cell would be considered heterologous for purposes of this invention.

[0023] A “coding sequence” or a sequence that “encodes” a particular polypeptide (e.g. SOCS2, etc.), is a nucleic acid sequence which is ultimately transcribed and/or translated into that polypeptide in vitro and/or in vivo when placed under the control of appropriate regulatory sequences. In certain embodiments, the boundaries of the coding sequence are determined by a start codon at the 5′ (amino) terminus and a translation stop codon at the 3′ (carboxy) terminus. A coding sequence can include, but is not limited to, cDNA from prokaryotic or eukaryotic mRNA, genomic DNA sequences from prokaryotic or eukaryotic DNA, and even synthetic DNA sequences. In preferred embodiments, a transcription termination sequence will usually be located 3′ to the coding sequence.

[0024] Expression “control sequences” refers collectively to promoter sequences, ribosome binding sites, polyadenylation signals, transcription termination sequences, upstream regulatory domains, enhancers, and the like, which collectively provide for the transcription and translation of a coding sequence in a host cell. Not all of these control sequences need always be present in a recombinant vector so long as the desired gene is capable of being transcribed and translated.

[0025] The transcription unit of the vectors of the invention is defined herein as the DNA sequences encoding a gene, any expression control sequences such as a promoter or enhancer, a polyadenylation element, and any other regulatory elements that may be used to modulate or increase expression, all of which are operably linked in order to allow expression of the transgene. The use of any expression control sequences which facilitate persistent expression of the gene is within the scope of the invention. Such sequences or elements may be capable of generating tissue-specific expression or may be inducible by exogenous agents or stimuli.

[0026] The phrases “hybridizing specifically to” or “specific hybridization” or “selectively hybridize to”, refer to the binding, duplexing, or hybridizing of a nucleic acid molecule preferentially to a particular nucleotide sequence under stringent conditions when that sequence is present in a complex mixture (e.g., total cellular) DNA or RNA.

[0027] The term “stringent conditions” refers to conditions under which a probe will hybridize preferentially to its target subsequence, and to a lesser extent to, or not at all to, other sequences. “Stringent hybridization” and “stringent hybridization wash conditions” in the context of nucleic acid hybridization experiments such as Southern and northern hybridizations are sequence dependent, and are different under different environmental parameters. An extensive guide to the hybridization of nucleic acids is found in Tijssen (1993) Laboratory Techniques in Biochemistry and Molecular Biology—Hybridization with Nucleic Acid Probes part I chapter 2 Overview of principles of hybridization and the strategy of nucleic acid probe assays, Elsevier, N.Y. Generally, highly stringent hybridization and wash conditions are selected to be about 5° C. lower than the thermal melting point (Tₘ) for the specific sequence at a defined ionic strength and pH. The Tₘ is the temperature (under defined ionic strength and pH) at which 50% of the target sequence hybridizes to a perfectly matched probe. Very stringent conditions are selected to be equal to the Tₘ for a particular probe.

[0028] An example of stringent hybridization conditions for hybridization of complementary nucleic acids which have more than 100 complementary residues on a filter in a Southern or northern blot is 50% formamide with 1 mg of heparin at 42° C., with the hybridization being carried out overnight. An example of highly stringent wash conditions is 0.15 M NaCl at 72° C. for about 15 minutes. An example of stringent wash conditions is a 0.2×SSC wash at 65° C. for 15 minutes (see, Sambrook et al. (1989) Molecular Cloning—A Laboratory Manual (2nd ed.) Vol. 1-3, Cold Spring Harbor Laboratory, Cold Spring Harbor Press, NY, (Sambrook et al.) supra for a description of SSC buffer). Often, a high stringency wash is preceded by a low stringency wash to remove background probe signal. An example medium stringency wash for a duplex of, e.g., more than 100 nucleotides, is 1×SSC at 45° C. for 15 minutes. An example low stringency wash for a duplex of, e.g., more than 100 nucleotides, is 4-6×SSC at 40° C. for 15 minutes. In general, a signal to noise ratio of 2×(or higher) than that observed for an unrelated probe in the particular hybridization assay indicates detection of a specific hybridization. Nucleic acids that do not hybridize to each other under stringent conditions are still substantially identical, if the polypeptides which they encode are substantially identical. This occurs, e.g., when a copy of a nucleic acid is created using the maximum codon degeneracy permitted by the genetic code.

[0029] The terms “identical” or percent “identity,” in the context of two or more nucleic acids or polypeptide sequences, refer to two or more sequences or subsequences that are the same or have a specified percentage of amino acid residues or nucleotides that are the same, when compared and aligned for maximum correspondence, as measured using one of the following sequence comparison algorithms or by visual inspection.

[0030] The phrase “substantially identical,” in the context of two nucleic acids or polypeptides, refers to two or more sequences or subsequences that have at least 60%, preferably 80%, most preferably 90-95% nucleotide or amino acid residue identity, when compared and aligned for maximum correspondence, as measured using one of the following sequence comparison algorithms or by visual inspection. Preferably, the substantial identity exists over a region of the sequences that is at least about 50 residues in length, more preferably over a region of at least about 100 residues, and most preferably the sequences are substantially identical over at least about 150 residues. In a most preferred embodiment, the sequences are substantially identical over the entire length of the coding regions.

[0031] For sequence comparison, typically one sequence acts as a reference sequence, to which test sequences are compared. When using a sequence comparison algorithm, test and reference sequences are input into a computer, subsequence coordinates are designated, if necessary, and sequence algorithm program parameters are designated. The sequence comparison algorithm then calculates the percent sequence identity for the test sequence(s) relative to the reference sequence, based on the designated program parameters.

[0032] Optimal alignment of sequences for comparison can be conducted, e.g., by the local homology algorithm of Smith & Waterman, Adv. Appl. Math. 2:482 (1981), by the homology alignment algorithm of Needleman & Wunsch, J. Mol. Biol. 48:443 (1970), by the search for similarity method of Pearson & Lipman (1988) Proc. Natl. Acad. Sci. USA 85:2444, by computerized implementations of these algorithms (GAP, BESTFIT, FASTA, and TFASTA in the Wisconsin Genetics Software Package, Genetics Computer Group, 575 Science Dr., Madison, Wis.), or by visual inspection (see generally Ausubel et al., supra).

[0033] One example of an algorithm that is suitable for determining percent sequence identity and sequence similarity is the BLAST algorithm, which is described in Altschul et al. (1990) J. Mol. Biol. 215: 403-410. Software for performing BLAST analyses is publicly available through the National Center for Biotechnology Information (http://www.ncbi.nlm.nih.gov/). This algorithm involves first identifying high scoring sequence pairs (HSPs) by identifying short words of length W in the query sequence, which either match or satisfy some positive-valued threshold score T when aligned with a word of the same length in a database sequence. T is referred to as the neighborhood word score threshold (Altschul et al, supra). These initial neighborhood word hits act as seeds for initiating searches to find longer HSPs containing them. The word hits are then extended in both directions along each sequence for as far as the cumulative alignment score can be increased. Cumulative scores are calculated using, for nucleotide sequences, the parameters M (reward score for a pair of matching residues; always >0) and N (penalty score for mismatching residues; always <0). For amino acid sequences, a scoring matrix is used to calculate the cumulative score. Extension of the word hits in each direction are halted when: the cumulative alignment score falls off by the quantity X from its maximum achieved value; the cumulative score goes to zero or below, due to the accumulation of one or more negative-scoring residue alignments; or the end of either sequence is reached. The BLAST algorithm parameters W, T, and X determine the sensitivity and speed of the alignment. The BLASTN program (for nucleotide sequences) uses as defaults a wordlength (W) of 11, an expectation (E) of 10, M=5, N=−4, and a comparison of both strands. For amino acid sequences, the BLASTP program uses as defaults a wordlength (W) of 3, an expectation (E) of 10, and the BLOSUM62 scoring matrix (see Henikoff & Henikoff (1989) Proc. Natl. Acad. Sci. USA 89:10915).

[0034] In addition to calculating percent sequence identity, the BLAST algorithm also performs a statistical analysis of the similarity between two sequences (see, e.g., Karlin & Altschul (1993) Proc. Natl. Acad. Sci. USA ,90: 5873-5787). One measure of similarity provided by the BLAST algorithm is the smallest sum probability (P(N)), which provides an indication of the probability by which a match between two nucleotide or amino acid sequences would occur by chance. For example, a nucleic acid is considered similar to a reference sequence if the smallest sum probability in a comparison of the test nucleic acid to the reference nucleic acid is less than about 0.1, more preferably less than about 0.01, and most preferably less than about 0.001.

[0035] Similarity at the protein level can also refer to the ability of a subject protein to compete with hg for binding to receptors or other interacting proteins and some (but not all) monoclonal antibodies raised against hg epitopes.

[0036] The term “biological sample” refers to sample is a sample of biological tissue, cells, or fluid that, in a healthy and/or pathological state, contains a nucleic acid or polypeptide that is to be detected according to the assays described herein. Such samples include, but are not limited to, cultured cells, primary cell preparations, sputum, amniotic fluid, blood, tissue or fine needle biopsy samples, urine, peritoneal fluid, and pleural fluid, or cells therefrom. Biological samples may also include sections of tissues (e.g., frozen sections taken for histological purposes). Although the sample is typically taken from a human patient, the assays can be used to detect gugu nucleic acids or proteins in samples from any mammal, such as dogs, cats, sheep, cattle, and pigs, etc. The sample may be pretreated as necessary by dilution in an appropriate buffer solution or concentrated, if desired. Any of a number of standard aqueous buffer solutions, employing one of a variety of buffers, such as phosphate, Tris, or the like, at physiological pH can be used.

[0037] The term “test agent” refers to an agent that is to be screened in one or more of the assays described herein. The agent can be virtually any chemical compound. It can exist as a single isolated compound or can be a member of a chemical (e.g. combinatorial) library. In a particularly preferred embodiment, the test agent will be a small organic molecule.

[0038] The term “small organic molecules” refers to molecules of a size comparable to those organic molecules generally used in pharmaceuticals. The term excludes biological macromolecules (e.g., proteins, nucleic acids, etc.). Preferred small organic molecules range in size up to about 5000 Da, more preferably up to 2000 Da, and most preferably up to about 1000 Da.

[0039] The term “conservative substitution” is used in reference to proteins or peptides to reflect amino acid substitutions that do not substantially alter the activity (specificity or binding affinity) of the molecule. Typically, conservative amino acid substitutions involve substitution one amino acid for another amino acid with similar chemical properties (e.g. charge or hydrophobicity). The following six groups each contain amino acids that are typical conservative substitutions for one another: 1) Alanine (A), Serine (S), Threonine (T); 2) Aspartic acid (D), Glutamic acid (E); 3) Asparagine (N), Glutamine (Q); 4) Arginine (R), Lysine (K); 5) Isoleucine (I), Leucine (L), Methionine (M), Valine (V); and 6) Phenylalanine (F), Tyrosine (Y), Tryptophan (W).

[0040] As used herein, an “antibody” refers to a protein or glycoprotein consisting of one or more polypeptides substantially encoded by immunoglobulin genes or fragments of immunoglobulin genes. The recognized immunoglobulin genes include the kappa, lambda, alpha, gamma, delta, epsilon and mu constant region genes, as well as myriad immunoglobulin variable region genes. Light chains are classified as either kappa or lambda. Heavy chains are classified as gamma, mu, alpha, delta, or epsilon, which in turn define the immunoglobulin classes, IgG, IgM, IgA, IgD and IgE, respectively. A typical immunoglobulin (antibody) structural unit is known to comprise a tetramer. Each tetramer is composed of two identical pairs of polypeptide chains, each pair having one “light” (about 25 kD) and one “heavy” chain (about 50-70 kD). The N-terminus of each chain defines a variable region of about 100 to 110 or more amino acids primarily responsible for antigen recognition. The terms variable light chain (V_{L}) and variable heavy chain (V_{H}) refer to these light and heavy chains respectively.

[0041] Antibodies exist as intact immunoglobulins or as a number of well characterized fragments produced by digestion with various peptidases. Thus, for example, pepsin digests an antibody below (i.e. toward the Fc domain) the disulfide linkages in the hinge region to produce F(ab)′₂, a dimer of Fab which itself is a light chain joined to V_{H}-C_{H}1 by a disulfide bond. The F(ab)′₂ may be reduced under mild conditions to break the disulfide linkage in the hinge region thereby converting the (Fab′)₂ dimer into an Fab′ monomer. The Fab′ monomer is essentially a Fab with part of the hinge region (see, Paul (1993) Fundamental Immunology, Raven Press, N.Y. for a more detailed description of other antibody fragments). While various antibody fragments are defined in terms of the digestion of an intact antibody, one of skill will appreciate that such fragments may be synthesized de novo either chemically, by utilizing recombinant DNA methodology, or by “phage display” methods (see, e.g., Vaughan et al. (1996) Nature Biotechnology, 14(3): 309-314, and PCT/US96/10287). Preferred antibodies include single chain antibodies, e.g, single chain Fv (scFv) antibodies in which a variable heavy and a variable light chain are joined together (directly or through a peptide linker) to form a continuous polypeptide (see, e.g. Bird et al. (1988) Science 242: 424-426; Huston et al. (1988) Proc. Nat. Acad. Sci. USA 85: 5879-5883)

### BRIEF DESCRIPTION OF THE DRAWINGS

[0042] FIG. 1 illustrates a physical map of the high growth (“hg”) region where: (A) are polymerase chain reaction (PCR)-based markers (sequence tagged sites, STSs) from ends of clones shown non-italicized, the genetic (microsatellite) marker “D10Mit69” is italicized, and a PCR-based marker derived from an exon trapping product we hereinafter call “B308A” is typed in bold. B308A corresponds to the murine Raidd/Cradd gene; (B) are genomic DNA of control mice tested as progenitors of high growth mice, AKR/J, C3H/HeJ, C57BL/6J, and DBA/2J, with the high growth mouse line being tested being C57BL/6J-hghg; (C) are Yeast Artificial Chromosome (YAC) clones, and (D) are Bacterial Artificial Chromosome (BAC) clones.

[0043] FIG. 2 illustrates Northern blots with hybridization to mouse embryonic stages and adult mouse tissues using the candidate exon “B308A” as a probe (two upper panels), and as a control the bottom two panels are blots stripped off the “B308A” probe and reprobed with cDNA for human B-actin gene.

[0044] FIG. 3A shows the nucleotide sequence of the cDNA in the mouse clone called “B308A-6-1” (SEQ ID NO:1), which corresponds to the murine Raidd/Cradd gene.

[0045] FIG. 3B shows the protein translation of the B308A-6-1 coding sequence (SEQ ID NO:4), which corresponds to the murine Raidd/Cradd gene.

[0046] FIG. 4 shows the nucleotide sequence of the original consensus B308 exon that was isolated, where polymorphism (A or T) found in one clone is indicated by a bold underlined T in position 286, and where primers used with this sequence are indicated with arrow lines (SEQ ID NO:2).

[0047] FIG. 5 illustrates a bovine fragment of the hg gene (SEQ ID NO:3) obtained with PCR primers of the cDNA mouse clone corresponding to the Raidd/Cradd gene.

[0048] FIG. 6 shows a diagram of a gene knock-out experiment for identification of the high growth gene, or locus.

[0049] FIG. 7 illustrates the identification of the high growth by gene addition.

[0050] FIG. 8 shows a Northern-blot analysis (Sambrook et al. (1989) Molecular Cloning—A Laboratory Manual (2nd ed.) Vol. 1-3, Cold Spring Harbor Laboratory, Cold Spring Harbor Press, NY; and Current Protocols in Molecular Biology) of Socs2 in the control (+, C57BLJ6J) and high growth (HG, C57BL/6J-hghg) mice demonstrating lack of Socs2 mRNA in the HG mice. The blot of total RNA (10 μg) was first probed with the Socs2 cDNA (EST clone, IMAGE ID 408909) and then reprobed with the human β-actin cDNA;

[0051] FIG. 9A illustrates the Genomic structure of the wild type Socs2 locus (+) and its disruption in the high growth (HG) mice. The murine Socs2 locus is shown with three exons and the coding region (black boxes). A 13907-bp sequence (SEQ ID NO: 9) encoding the Socs2 locus has been submitted to GenBank (accession No. AF292933); the number above each restriction enzyme site (H, HindIII; P, PvuII) relates to a position in this sequence. The deletion breakpoint in HG mice is marked with *. The probes for Southern analysis (FIG. 9B) encompassed the following nucleotides (nt) in the sequence (Genbank accession No. AF292933): Exon 2 probe (nt 4501-4639), Exon 3 probe (nt 6929-7101), and the 3′-Socs2 probe (nt 11185-11813). PCR assays I-VI (FIG. 9A) used for fine mapping of a deletion breakpoint in the HG mice utilized the same 5′ primer (nt 5089-5108) and different 3′ primers: nt 5421-5440 (I), nt 5465-5484 (II), nt 5511-5530 (III), nt 5558-5578 (IV), nt 5626-5645 (V), and nt 5671-5690 (VI). PCR assays I and II amplify in +, HG and BAC clone 520L19 DNAs (Horvat and Medrano (1998) Genomics 54: 159-164) whereas III-VI amplify in + and BAC clone 520L19 but not in HG, which maps a deletion breakpoint to intron 2 between nt 5485 and 5510. FIG. 9B shows a Southern analysis (Sambrook, supra) of the Socs2 region using 5 μg of HindIII or PvulI-digested genomic DNA of control (+, C57BL/6J) and high growth (HG, C57BL/6J-hghg) mice. On the left of each blot are the sizes of fragments (kb) that are of expected size based on the genomic sequence (FIG. 9A). Additional bands (*) hybridizing to Exon 2 and Exon 3 probes that appear in both control and HG DNA are most likely derived from the Socs2 pseudogene(s) (Metcalf, et al. (2000) Nature, 405: 1069-1073). The Exon 3 probe and the 3′-Socs2 probe hybridized to expected-size bands in control but not in HG mice demonstrating that these regions are deleted in HG. In contrast, Exon 2 probe hybridizes to a PvuII fragment (nt 2513-4678) of predicted size (2.165 kb) in both control and HG DNA showing that this fragment is retained in the HG genome. However, the exon 2 probe creates a HindIII fragment (marked with an arrowhead) of higher molecular weight (˜7 kb) in HG than in control mice (nt 3046-5976, 2.93 kb). This indicates that the HindII1 site (nt 3046) is retained in HG mice but the downstream HindIII site in intron 2 (nt 5976) is deleted, demonstrating that the deletion breakpoint is located in intron 2.

[0052] FIG. 10 shows a map of markers typed in the C57-hg/hg×CAST F₂ cross. Underlined markers were added in significant chromosomal regions identified through ANOVA. Markers in bold italics were also typed in the +/+ mice of the F₂ cross.

[0053] FIG. 11 shows sex-adjusted means and standard errors for selected traits and markers that showed significant two-way interactions with hg. Mice were classified based on their genotype at the markers closest to a detected QTL. Symbols above the C57/CAST and CAST/CAST bars indicate the significance of the contrasts: [C57/CAST−½×(C57/C57+CAST/CAST)] and [C57/C57−CAST/CAST], respectively (NS: non significant, *:p<0.05, **:p<0.01, ***:P<0.001).

[0054] FIGS. 12A and 12B show LOD score plots for G29, carcass protein, carcass ash, and femur length adjusted for the effects of sex and age, on chromosome 2 of hg/hg (FIG. 12A) and +/+ (FIG. 12B) F₂ mice. The genome-wide and chromosome significance thresholds are shown as dotted lines for hg/hg and +/+ mice respectively. Markers used in the analysis are shown below the horizontal axis. Peak LOD scores for QTL are identified with a horizontal line.

[0055] FIG. 13 is a diagram showing the breakpoints of the hg deletion and the genes (Socs2/Cish2, Raidd/Cradd and Vespr) that are included in the ˜650 kb high growth genomic region in mouse chromosome 10.

[0056] FIG. 14 shows an mRNA Northern blot showing the lack of expression of Socs2/Cish2 and Raidd/Cradd in various tissues (L, liver; B, brain, K, kidney; H, heart; Lu, lung; M, muscle; T, testis; E, 13d. embryo) in high growth (hg/hg) mice and the positive expression of Vespr in comparison to control mice (+/+).

### DETAILED DESCRIPTION

[0057] This invention pertains to the identification and isolation of a gene that regulates body size in mammals. More particularly this invention relates to the discovery of a gene, designated herein as hg or Socs2, when downregulated or knocked-out, results in a high growth (hg) phenotype. Specifically it is demonstrated herein that the hg phenotype is characterized by a particular Socs2 allele, designated herein as Socs2^{hg}.

[0058] Since an hg clone B308A-6-1 corresponding to the murine Raidd/Cradd gene identified herein, is highly conserved across species, it is possible to use conserved regions of B308A-6-1 to create probes for mapping the homologous region of hg in other species and to identify chromosome rearrangements that include the Socs2 gene in other species. For example, it is possible to use these regions of high homology to isolate the other species' hg genes by high or medium stringency hybridization, or by the polymerase chain reaction. One is able to isolate, by polymerase chain reaction, a fragment of DNA coding for hg or hg family members when using primers of degenerate sequence. Thus, using the mouse Socs2 gene identified herein, other mammalian Socs2 genes are readily identifiable. Indeed, GenBank Accession Number AF132441 provides a partial cds for the Homo sapiens suppressor of cytokine signalling-2 SOCS-2 gene and using these sequences full-length genes are readily available.

[0059] It is demonstrated herein that downregulation (e.g. via a knockout) of the Socs2 gene produces the high-growth (hg) phenotype, a phenotype characterized by a typical 30-50% increase in growth of tissues and organs, where the growth does not result in obesity. The phenotype is also characterized by an increase in the efficiency of conversion of feed to muscle mass; decreased growth hormone levels in pituitary and plasma; an elevated plasma level of insulin growth factor-1, and, an increased muscle mass due, primarily, to an increase in muscle fiber number (i.e., hyperplasia) and a moderate fiber hypertrophy.

[0060] Thus, in one embodiment, this invention provides methods for creating a high-growth (hg) phenotype mammal. The methods involve inhibiting expression of an hg nucleic acid (e.g Socs2) identified herein. Also provided are the high-growth phenotype animals themselves.

[0061] Having discovered that Socs2 inhibition results in a high growth (hg) phenotype, this invention also provides methods of screenign for agents that modulate (increase or decrease) the hg phenotype. Such methods typically involve screening for agents that upregulate or downregulate Socs2 transcription or translation or Socs2 polypeptide actigvity.

[0062] In various embodiements, this invention also provides for nucleic acids whose reduced expression provides an hg phenotype, for proteins or protein fragments encoded by such nucleic acids, and for antibodies that specifically bind such proteins or protein fragments.

[0063] The hg chromosomal region identified herein show synteny of hg with the chromosomal regions of a number of other species: The Raidd/Cradd gene (located within the hg deletion) is mapped to an interval of 100 to 103 cM from the top of the genetic map of human chromosome 12, and to 12q21.33-q23.1 in the cytogenetic map (see, also Horvat and Medrano (1998) Genomics 54: 159-164). This positioning of hg identifies a known region of synteny conservation of several human and mouse chromosome 10 loci flanking the hg region (Wakefield and Graves (1996) Mamm. Genome 7: 715-716; Archibald et al. (1999) Bioinformatics for comparative genomics in farmed and domestic animals. Plant/Animal Genome Conference (PAG-VII), San Diego, Calif., TCAGDB database; Aleyasin and Barendse (1999) Amer. Genet. Assoc. 90: 537-542) that correspond to bovine and pig chromosome 5, sheep chromosome 3, and chicken chromosome 1, suggesting that a counterpart or alleles of hg may be found in these species. Also, Raidd/Cradd, has been mapped by in-situ hybridization to chicken chromosome 1 (Smith et al. (2000) Mamm Genome 11: 706-709) corresponding to the approximate location of a growth QTL in broilers (Groenen et al. (1997) Anim. Biotechnology 8: 41-46). In addition, Stone et al. (1999) J. Anim. Sci. 77: 1379-1384, reported a QTL affecting carcass traits in cattle chromosome 5, in the homologous region to hg. No candidate genes have been proposed to date for any of these phenotypes. Without being bound by a particular theory, it is believed the hg gene of this invention finds homologs in these regions in humans and livestock.

[0064] A notable characteristic of the high growth phenotype is the consistently high level of plasma IGF-1 in growing and mature mice (Medrano et al. (1991) Genetical Research 58: 67-74; Reiser et al. (1996) Amer. J. Physiol. 40: R696-R703; Corva and Medrano (2000) Physiological Genomics 3: 17-23). IGF-1 is a growth factor with multiple functions is believed to, directly or indirectly, have an effect on cell differentiation and proliferation, and play a role as an anti-apoptotic factor (Stewart and Rotwein (1996) Phys. Rev. 76: 1005-1026). We have seen alteration in myogenesis of HG mice that may also be related to IGF-1 levels. This emphasizes the importance a gene, like Socs2/Cish2 that determines the HG phenotype has in relation to meat producing animals. In addition to growth related effects, we have observed that HG mice have a finer and denser fur. There is extensive data indicating that IGF-1 has a stimulatory effect on the activity of the hair follicle. For example, overexpression of Igf-1 in the skin of transgenic mice resulted in increased vibrissa growth (Su et al. (1999) J Invest Dermatol 112: 245-248), and a similar effect was elicited for wool growth in transgenic sheep (Damak et al. (1996) Biotechnology 14: 185-188). In humans, IGF-1 has been shown to regulate the growth of hair follicles in vitro (Philpott et al. (1994) J Invest Dematol 102: 857-861). Therefore, understanding the effect of the Socs2/Cish2 gene involved in the regulation of IGF-1 in HG mice may be useful to manipulate the levels of this hormone that may affect not only growth, but fur or wool production in economically important animals.

[0065] The identification of allelic differences in the Socs2/Cish2 gene, e.g., as described herein, is useful for selecting faster-growing and more efficient animals within breeds. Paternal lines can be developed for crossbreeding schemes carrying specific natural alleles or even artificially created null variants (e.g. knock-outs) of the hg gene. The progeny of such matings can then be marketed at early ages. The increased growth rate and feed efficiency of HG would also be a very desirable trait to express in cultured fish, like sturgeon, that have a long developmental period and slow growth rate.

[0066] Using the teaching provided herein, novel strategies exist for the manipulation of growth by altering the expression of Socs2/Cish2, such as the reduction or elimination of the gene products. This technology can be used in a wide variety of contexts including, but not limited to: A) The production of germ-line knockout animals (e.g in in chickens that have a short and intense growth period), B) The regulation of gene expression at specific times in development, e.g., by engineering zinc finger proteins as designer transcription factors in transgenic animals (see, e.g., Kang and Kim (2000) J. Biol. Chem., 275: 8742-8748), C) The creation of knockouts targeted to specific tissues, e.g. using ribozyme/antisense-mediated transgenesis or by somatic cell transfer to specific organs like the mammary gland (e.g if the growth of mammary cells is stimulated at a specific time in the development of lactation, it is milk production in cows (or other mammals) can be increased or the animals can be maintained longer in a lactating stage), and D) The use of pharmacological agents or antibodies against a protein coded by Socs2/Cish2 or to another protein in the metabolic pathway at specific stages of development of a growing or finishing animal can be useful to increase growth for a period of days in beef-cattle arriving to a feedlot, or to stimulate the growth of pigs, sheep, goats, chicken, or fish. These applications are intended to be illustrative and not limiting.

[0067] I. Inhibition of Socs2 to produce a high-growth phenotype

[0068] It is demonstrated herein that inhibition of Socs2 produces a high-growth (hg) phenotype mammal and this invention provides for mammals showing inhibited Socs2 expression. Such high-growth animals are useful in a number of contexts. For example, they provide useful organism for the study of pathologies associated with altered growth regulation, they also provide animals with a faster growth rate and increased feed conversion effciciency for the accreation of lean body mass (i.e., more consumable biomass at a lower cost per animal). Socs2 expression can be inhibited using a wide variety of approaches that include, but are not limited to antisense molecules, Socs2-specific ribozymes, Socs2-specific catalytic DNAs, Socs2-specific RNAi, intrabodies directed against Socs2 proteins, “gene therapy” approaches that knock out Socs2, and small organic molecules that inhibit Socs2 expression/overexpression or block a receptor that is required to induce Socs2.

[0069] A) Antisense approaches

[0070] Socs2 gene regulation can be downregulated or entirely inhibited by the use of antisense molecules. An “antisense sequence or antisense nucleic acid” is a nucleic acid that is complementary to the coding Socs2 mRNA nucleic acid sequence or a subsequence thereof. Binding of the antisense molecule to the Socs2 mRNA interferes with normal translation of the Socs2 polypeptide.

[0071] Thus, in accordance with preferred embodiments of this invention, preferred antisense molecules include oligonucleotides and oligonucleotide analogs that are hybridizable with Socs2 messenger RNA. This relationship is commonly denominated as “antisense.” The oligonucleotides and oligonucleotide analogs are able to inhibit the function of the RNA, either its translation into protein, its translocation into the cytoplasm, or any other activity necessary to its overall biological function. The failure of the messenger RNA to perform all or part of its function results in a reduction or complete inhibition of expression of Socs2 polypeptides.

[0072] In the context of this invention, the term “oligonucleotide” refers to a polynucleotide formed from naturally-occurring bases and/or cyclofuranosyl groups joined by native phosphodiester bonds. This term effectively refers to naturally-occurring species or synthetic species formed from naturally-occurring subunits or their close homologs. The term “oligonucleotide” may also refer to moieties which function similarly to oligonucleotides, but which have non naturally-occuring portions. Thus, oligonucleotides may have altered sugar moieties or inter-sugar linkages. Exemplary among these are the phosphorothioate and other sulfur containing species that are known for use in the art. In accordance with some preferred embodiments, at least one of the phosphodiester bonds of the oligonucleotide has been substituted with a structure which functions to enhance the ability of the compositions to penetrate into the region of cells where the RNA whose activity is to be modulated is located. It is preferred that such substitutions comprise phosphorothioate bonds, methyl phosphonate bonds, or short chain alkyl or cycloalkyl structures. In accordance with other preferred embodiments, the phosphodiester bonds are substituted with structures which are, at once, substantially non-ionic and non-chiral, or with structures which are chiral and enantiomerically specific. Persons of ordinary skill in the art will be able to select other linkages for use in the practice of the invention.

[0073] In one particularly preferred embodiment, the internucleotide phosphodiester linkage is replaced with a peptide linkage. Such peptide nucleic acids tend to show improved stability, penetrate the cell more easily, and show enhances affinity for their target. Methods of making peptide nucleic acids are known to those of skill in the art (see, e.g., U.S. Pat. Nos.: 6,015,887, 6,015,710, 5,986,053, 5,977,296, 5,902,786, 5,864,010, 5,786,461, 5,773,571, 5,766,855, 5,736,336, 5,719,262, and 5,714,331).

[0074] Oligonucleotides may also include species which include at least some modified base forms. Thus, purines and pyrimidines other than those normally found in nature may be so employed. Similarly, modifications on the furanosyl portions of the nucleotide subunits may also be effected, as long as the essential tenets of this invention are adhered to. Examples of such modifications are 2′-O-alkyl- and 2′-halogen-substituted nucleotides. Some specific examples of modifications at the 2′ position of sugar moieties which are useful in the present invention are OH, SH, SCH₃, F, OCH₃, OCN, O(CH₂)[n]NH₂ or O(CH₂)[n]CH₃, where n is from 1 to about 10, and other substituents having similar properties.

[0075] Such oligonucleotides are best described as being functionally interchangeable with natural oligonucleotides or synthesized oligonucleotides along natural lines, but which have one or more differences from natural structure. All such analogs are comprehended by this invention so long as they function effectively to hybridize with messenger RNA of Socs2 to inhibit the function of that RNA.

[0076] The oligonucleotides in accordance with this invention preferably comprise from about 3 to about 50 subunits. It is more preferred that such oligonucleotides and analogs comprise from about 8 to about 25 subunits and still more preferred to have from about 12 to about 20 subunits. As will be appreciated, a subunit is a base and sugar combination suitably bound to adjacent subunits through phosphodiester or other bonds. The oligonucleotides used in accordance with this invention can be conveniently and routinely made through the well-known technique of solid phase synthesis. Equipment for such synthesis is sold by several vendors (e.g. Applied Biosystems). Any other means for such synthesis may also be employed, however, the actual synthesis of the oligonucleotides is well within the talents of the routineer. It is also will known to prepare other oligonucleotide such as phosphorothioates and alkylated derivatives.

[0077] B) Catalytic RNAs and DNAs

[0078] 1) Ribozymes

[0079] In another approach, Socs2 expression can be inhibited by the use of ribozymes. As used herein, “ribozymes” include RNA molecules that contain antisense sequences for specific recognition, and an RNA-cleaving enzymatic activity. The catalytic strand cleaves a specific site in a target (Socs2) RNA, preferably at greater than stoichiometric concentration. Two “types” of ribozymes are particularly useful in this invention, the hammerhead ribozyme (Rossi et al. (1991) Pharmac. Ther. 50: 245-254) and the hairpin ribozyme (Hampel et al. (1990) Nucl. Acids Res. 18: 299-304, and U.S. Pat. No. 5,254,678).

[0080] Because both hammerhead and hairpin ribozymes are catalytic molecules having antisense and endoribonucleotidase activity, ribozyme technology has emerged as a potentially powerful extension of the antisense approach to gene inactivation. The ribozymes of the invention typically consist of RNA, but such ribozymes may also be composed of nucleic acid molecules comprising chimeric nucleic acid sequences (such as DNA/RNA sequences) and/or nucleic acid analogs (e.g., phosphorothioates).

[0081] Accordingly, within one aspect of the present invention ribozymes are described that have the ability to inhibit Socs2 expression. Such ribozymes may be in the form of a “hammerhead” (for example, as described by Forster and Symons (1987) Cell 48: 211-220,; Haseloff and Gerlach (1988) Nature 328: 596-600; Walbot and Bruening (1988) Nature 334: 196; Haseloff and Gerlach (1988) Nature 334: 585) or a “hairpin” (see, e.g. U.S. Pat. No. 5,254,678 and Hampel et al., European Patent Publication No. 0 360 257, published Mar. 26, 1990), and have the ability to specifically target, cleave and Socs2 nucleic acids.

[0082] The sequence requirement for the hairpin ribozyme is any RNA sequence consisting of NNNBN*GUCNNNNNN (where N*G is the cleavage site, where B is any of G, C, or U, and where N is any of G, U, C, or A) (SEQ ID NO:______). Suitable Socs2 recognition or target sequences for hairpin ribozymes can be readily determined from the Socs2 sequence. Certain appropriate sequences include, but are not limited to sequences used as targets for antisense molecules.

[0083] The sequence requirement at the cleavage site for the hammerhead ribozyme is any RNA sequence consisting of NUX (where N is any of G, U, C, or A and X represents C, U, or A) can be targeted. Accordingly, the same target within the hairpin leader sequence, GUC, is useful for the hammerhead ribozyme. The additional nucleotides of the hammerhead ribozyme or hairpin ribozyme are determined by the target flanking nucleotides and the hammerhead consensus sequence (see Ruffner et al. (1990) Biochemistry 29: 10695-10702).

[0084] Cech et al. (U.S. Pat. No. 4,987,071,) has disclosed the preparation and use of certain synthetic ribozymes which have endoribonuclease activity. These ribozymes are based on the properties of the Tetrahymena ribosomal RNA self-splicing reaction and require an eight base pair target site. A temperature optimum of 50° C. is reported for the endoribonuclease activity. The fragments that arise from cleavage contain 5′ phosphate and 3′ hydroxyl groups and a free guanosine nucleotide added to the 5′ end of the cleaved RNA. The preferred ribozymes of this invention hybridize efficiently to target sequences at physiological temperatures, making them particularly well suited for use in vivo

[0085] The ribozymes for this invention, as well as DNA encoding such ribozymes and other suitable nucleic acid molecules can be chemically synthesized using methods well known in the art for the synthesis of nucleic acid molecules. Alternatively, Promega, Madison, Wis., USA, provides a series of protocols suitable for the production of RNA molecules such as ribozymes. The ribozymes also can be prepared from a DNA molecule or other nucleic acid molecule (which, upon transcription, yields an RNA molecule) operably linked to an RNA polymerase promoter, e.g., the promoter for T7 RNA polymerase or SP6 RNA polymerase. Such a construct may be referred to as a vector. Accordingly, also provided by this invention are nucleic acid molecules, e.g., DNA or cDNA, coding for the ribozymes of this invention. When the vector also contains an RNA polymerase promoter operably linked to the DNA molecule, the ribozyme can be produced in vitro upon incubation with the RNA polymerase and appropriate nucleotides. In a separate embodiment, the DNA may be inserted into an expression cassette (see, e.g., Cotten and Birnstiel (1989) EMBO J 8(12):3861-3866; Hempel et al. (1989) Biochem. 28: 4929-4933, etc.).

[0086] After synthesis, the ribozyme can be modified by ligation to a DNA molecule having the ability to stabilize the ribozyme and make it resistant to RNase. Alternatively, the ribozyme can be modified to the phosphothio analog for use in liposome delivery systems. This modification also renders the ribozyme resistant to endonuclease activity.

[0087] The ribozyme molecule also can be in a host prokaryotic or eukaryotic cell in culture or in the cells of an organism/patient. Appropriate prokaryotic and eukaryotic cells can be transfected with an appropriate transfer vector containing the DNA molecule encoding a ribozyme of this invention. Alternatively, the ribozyme molecule, including nucleic acid molecules encoding the ribozyme, may be introduced into the host cell using traditional methods such as transformation using calcium phosphate precipitation (Dubensky et al. (1984) Proc. Natl. Acad. Sci., USA, 81: 7529-7533), direct microinjection of such nucleic acid molecules into intact target cells (Acsadi et al. (1991) Nature 352: 815-818), and electroporation whereby cells suspended in a conducting solution are subjected to an intense electric field in order to transiently polarize the membrane, allowing entry of the nucleic acid molecules. Other procedures include the use of nucleic acid molecules linked to an inactive adenovirus (Cotton et al. (1990) Proc. Natl. Acad. Sci., USA, 89 :6094), lipofection (Felgner et al. (1989) Proc. Natl. Acad. Sci. USA 84: 7413-7417), microprojectile bombardment (Williams et al. (1991) Proc. Natl. Acad. Sci., USA, 88: 2726-2730), polycation compounds such as polylysine, receptor specific ligands, liposomes entrapping the nucleic acid molecules, spheroplast fusion whereby E coli containing the nucleic acid molecules are stripped of their outer cell walls and fused to animal cells using polyethylene glycol, viral transduction, (Cline et al., (1985) Pharmac. Ther. 29: 69; and Friedmann et al. (1989) Science 244: 1275), and DNA ligand (Wu et al (1989) J. Biol. Chem. 264: 16985-16987), as well as psoralen inactivated viruses such as Sendai or Adenovirus. In one preferred embodiment, the ribozyme is introduced into the host cell utilizing a lipid, a liposome or a retroviral vector.

[0088] When the DNA molecule is operatively linked to a promoter for RNA transcription, the RNA can be produced in the host cell when the host cell is grown under suitable conditions favoring transcription of the DNA molecule. The vector can be, but is not limited to, a plasmid, a virus, a retrotransposon or a cosmid. Examples of such vectors are disclosed in U.S. Pat. No. 5,166,320. Other representative vectors include, but are not limited to adenoviral vectors (e.g., WO 94/26914, WO 93/9191; Kolls et al. (1994) PNAS 91(1):215-219; Kass-Eisler et al., (1993) Proc. Natl. Acad. Sci., USA, 90(24): 11498-502, Guzman et al. (1993) Circulation 88(6): 2838-48, 1993; Guzman et al. (1993) Cir. Res. 73(6):1202-1207, 1993; Zabner et al. (1993) Cell 75(2): 207-216; Li et al. (1993) Hum Gene Ther. 4(4): 403-409; Caillaud et al. (1993) Eur. J Neurosci. 5(10): 1287-1291), adeno-associated vector type 1 (“AAV-1”) or adeno-associated vector type 2 (“AAV-2”) (see WO 95/13365; Flotte et al (1993) Proc. Natl. Acad. Sci., USA, 90(22):10613-10617), retroviral vectors (e.g., EP 0 415 731; WO 90/07936; WO 91/02805; WO 94/03622; WO 93/25698; WO 93/25234; U.S. Pat. No. 5,219,740; WO 93/11230; WO 93/10218) and herpes viral vectors (e.g., U.S. Pat. No. 5,288,641). Methods of utilizing such vectors in gene therapy are well known in the art, see, for example, Larrick and Burck (1991) Gene Therapy: Application of Molecular Biology, Elsevier Science Publishing Co., Inc., New York, N.Y., and Kreigler (1990) Gene Transfer and Expression: A Laboratory Manual, W. H. Freeman and Company, New York.

[0089] To produce ribozymes in vivo utilizing vectors, the nucleotide sequences coding for ribozymes are preferably placed under the control of a strong promoter such as the lac, SV40 late, SV40 early, or lambda promoters. Ribozymes are then produced directly from the transfer vector in vivo

[0090] 2) Catalytic DNA

[0091] In a manner analogous to ribozymes, DNAs are also capable of demonstrating catalytic (e.g. nuclease) activity. While no such naturally-occurring DNAs are known, highly catalytic species have been developed by directed evolution and selection. Beginning with a population of 10¹⁴ DNAs containing 50 random nucleotides, successive rounds of selective amplification, enriched for individuals that best promote the Pb²⁺-dependent cleavage of a target ribonucleoside 3′-O—P bond embedded within an otherwise all-DNA sequence. By the fifth round, the population as a whole carried out this reaction at a rate of 0.2 min⁻¹. Based on the sequence of 20 individuals isolated from this population, a simplified version of the catalytic domain that operates in an intermolecular context with a turnover rate of 1 min⁻¹ (see, e.g, Breaker and Joyce (1994) Chem Biol 4: 223-229.

[0092] In later work, using a similar strategy, a DNA enzyme was made that could cleave almost any targeted RNA substrate under simulated physiological conditions. The enzyme is comprised of a catalytic domain of 15 deoxynucleotides, flanked by two substrate-recognition domains of seven to eight deoxynucleotides each. The RNA substrate is bound through Watson-Crick base pairing and is cleaved at a particular phosphodiester located between an unpaired purine and a paired pyrimidine residue. Despite its small size, the DNA enzyme has a catalytic efficiency (kcat/Km) of approximately 10⁹ M⁻¹ min⁻¹ under multiple turnover conditions, exceeding that of any other known nucleic acid enzyme. By changing the sequence of the substrate-recognition domains, the DNA enzyme can be made to target different RNA substrates (Santoro and Joyce (1997) Proc. Natl. Acad. Sci., USA, 94(9): 4262-4266). Modifying the appropriate targeting sequences (e.g. as described by Santoro and Joyce, supra.) the DNA enzyme can easily be retargeted to Socs2 mRNA thereby acting like a ribozyme.

[0093] C) RNAi inhibition of Socs2 expression

[0094] Post-transcriptional gene silencing (PTGS) or RNA interference (RNAi) refers to a mechanism by which double-stranded (sense strand) RNA (dsRNA) specifically blocks expression of its homologous gene when injected, or otherwise introduced into cells. The discovery of this incidence came with the observation that injection of antisense or sense RNA strands into Caenorhabditis elegans cells resulted in gene-specific inactivation (Guo and Kempheus (1995) Cell 81: 611-620). While gene inactivation by the antisense strand was expected, gene silencing by the sense strand came as a surprise. Adding to the surprise was the finding that this gene-specific inactivation actually came from trace amounts of contaminating dsRNA (Fire et al. (1998) Nature 391: 806-811).

[0095] Since then, this mode of post-transcriptional gene silencing has been tied to a wide variety of organisms: plants, flies, trypanosomes, planaria, hydra, zebrafish, and mice (Zamore et al. (2000). Cell 101: 25-33; Gura (2000) Nature 404: 804-808). RNAi activity has been associated with functions as disparate as transposon-silencing, anti-viral defense mechanisms, and gene regulation (Grant (1999) Cell 96: 303-306).

[0096] By injecting dsRNA into tissues, one can inactivate specific genes not only in those tissues, but also during various stages of development. This is in contrast to tissue-specific knockouts or tissue-specific dominant-negative gene expressions, which do not allow for gene silencing during various stages of the developmental process (Gura (2000) Nature 404: 804-808). The double-stranded RNA is cut by a nuclease activity into 21-23 nucleotide fragments. These fragments, in turn, target the homologous region of their corresponding mRNA, hybridize, and result in a double-stranded substrate for a nuclease that degrades it into fragments of the same size (Hammond et al. (2000) Nature, 404: 293-298; Zamore et al. (2000). Cell 101: 25-33).

[0097] Double stranded RNA (dsRNA) can be introduced into cells by any of a wide variety of means. Such methods include, but are not limited to lipid-mediated transfection (e.g. using reagents such as lipofectamine), liposome delivery, dendrimer-mediated transfection, and gene transfer using a viral or bacterial vector. Where the vector expresses (transcribes) a single-stranded RNA, the vector can be designed to trasnscribe two complementary RNA strands that will then hybridize to form a double-stranded RNA.

[0098] D) Knocking out Socs2

[0099] In another approach, Socs2 can be inhibited/downregulated simply by “knocking out” the gene. Typically this is accomplished by disrupting the Socs2 gene, the promoter regulating the gene or sequences between the promoter and the gene. Such disruption can be specifically directed to Socs2 by homologous recombination where a “knockout construct” contains flanking sequences complementary to the domain to which the construct is targeted. Insertion of the knockout construct (e.g into the Socs2 gene) results in disruption of that gene. The phrases “disruption of the gene” and “gene disruption” refer to insertion of a nucleic acid sequence into one region of the native DNA sequence (usually one or more exons) and/or the promoter region of a gene so as to decrease or prevent expression of that gene in the cell as compared to the wild-type or naturally occurring sequence of the gene. By way of example, a nucleic acid construct can be prepared containing a DNA sequence encoding an antibiotic resistance gene which is inserted into the DNA sequence that is complementary to the DNA sequence (promoter and/or coding region) to be disrupted. When this nucleic acid construct is then transfected into a cell, the construct will integrate into the genomic DNA. Thus, the cell and its progeny will no longer express the gene or will express it at a decreased level, as the DNA is now disrupted by the antibiotic resistance gene.

[0100] Knockout constructs can be produced by standard methods known to those of skill in the art. The knockout construct can be chemically synthesized or assembled, e.g., using recombinant DNA methods. The DNA sequence to be used in producing the knockout construct is digested with a particular restriction enzyme selected to cut at a location(s) such that a new DNA sequence encoding a marker gene can be inserted in the proper position within this DNA sequence. The proper position for marker gene insertion is that which will serve to prevent expression of the native gene; this position will depend on various factors such as the restriction sites in the sequence to be cut, and whether an exon sequence or a promoter sequence, or both is (are) to be interrupted (i.e., the precise location of insertion necessary to inhibit promoter function or to inhibit synthesis of the native exon). Preferably, the enzyme selected for cutting the DNA will generate a longer arm and a shorter arm, where the shorter arm is at least about 300 base pairs (bp). In some cases, it will be desirable to actually remove a portion or even all of one or more exons of the gene to be suppressed so as to keep the length of the knockout construct comparable to the original genomic sequence when the marker gene is inserted in the knockout construct. In these cases, the genomic DNA is cut with appropriate restriction endonucleases such that a fragment of the proper size can be removed.

[0101] The marker gene can be any nucleic acid sequence that is detectable and/or assayable, however typically it is an antibiotic resistance gene or other gene whose expression or presence in the genome can easily be detected. The marker gene is usually operably linked to its own promoter or to another strong promoter from any source that will be active or can easily be activated in the cell into which it is inserted; however, the marker gene need not have its own promoter attached as it may be transcribed using the promoter of the gene to be suppressed. In addition, the marker gene will normally have a polyA sequence attached to the 3′ end of the gene; this sequence serves to terminate transcription of the gene. Preferred marker genes are any antibiotic resistance gene including, but not limited to neo (the neomycin resistance gene) and beta-gal (beta-galactosidase).

[0102] After the genomic DNA sequence has been digested with the appropriate restriction enzymes, the marker gene sequence is ligated into the genomic DNA sequence using methods well known to the skilled artisan (see, e.g., Berger and Kimmel, Guide to Molecular Cloning Techniques, Methods in Enzymology volume 152 Academic Press, Inc., San Diego, Calif.; Sambrook et al. (1989) Molecular Cloning—A Laboratory Manual (2nd ed.) Vol. 1-3, Cold Spring Harbor Laboratory, Cold Spring Harbor Press, NY; and Current Protocols in Molecular Biology, F. M. Ausubel et al., eds., Current Protocols, a joint venture between Greene Publishing Associates, Inc. and John Wiley & Sons, Inc., (1994) Supplement). The ends of the DNA fragments to be ligated must be compatible; this is achieved by either cutting all fragments with enzymes that generate compatible ends, or by blunting the ends prior to ligation. Blunting is done using methods well known in the art, such as for example by the use of Klenow fragment (DNA polymerase I) to fill in sticky ends.

[0103] Suitable knockout constructs have been made and used to produce Socs2 knockout mice (see, Examples herein). The knockout constructs can be delivered to cells in vivo using gene therapy delivery vehicles (e.g. retroviruses, liposomes, lipids, dendrimers, etc.) as described below. Methods of knocking out genes are well described in the literature and essentially routine to those of skill in the art (see, e.g., Thomas et al. (1986) Cell 44(3): 419-428; Thomas, et al. (1987) Cell 51(3): 503-512)1; Jasin and Berg (1988) Genes & Development 2: 1353-1363; Mansour, et al. (1988) Nature 336: 348-352; Brinster, et al. (1989) Proc Natl Acad Sci 86: 7087-7091; Capecchi (1989) Trends in Genetics 5(3): 70-76; Frohman and Martin (1989) Cell 56: 145-147; Hasty, et al. (1991) Mol Cell Bio 11(11): 5586-5591; Jeannotte, et al. (1991) Mol Cell Biol. 11(11): 557814 5585; and Mortensen, et al. (1992) Mol Cell Biol. 12(5): 2391-2395

[0104] The use of homologous recombination to alter expression of endogenous genes is also described in detail in U.S. Pat. No. 5,272,071, WO 91/09955, WO 93/09222, WO 96/29411, WO 95/31560, and WO 91/12650.

[0105] @@Production of the knockout animals of this invention is not dependent on the availability of ES cells. In various embodiments, knockout animals of this invention can be produced using methods of somatic cell nuclear transfer. In preferred embodiments using such an approach, a somatic cell is obtained from the species in which the Socs2 gene is to be knocked out. The cell is transfected with a construct that introduces a disruption in the Socs2 gene (e.g. via heterologous recombination) as described herein. Cells harboring a knocked out Socs2 gene are selected as described herein. The nucleus of such cells harboring the knockout is then placed in an unfertilized enucleated egg (e.g., eggs from which the natural nuclei have been removed by microsurgery). Once the transfer is complete, the recipient eggs contained a complete set of genes, just as they would if they had been fertilized by sperm. The eggs are then cultured for a period before being implanted into a host mammal (of the same species that provided the egg) where they are carried to term, culminating in the berth of a transgenic animal comprising a nucleic acid construct containing one or more disrupted Ttpa genes (e.g the disrupted Ttpa gene).

[0106] The production of viable cloned mammals following nuclear transfer of cultured somatic cells has been reported for a wide variety of species including, but not limited to frogs (McKinnell (1962) J. Hered. 53, 199-207), calves (Kato et al. (1998) Science 262: 2095-2098), sheep (Campbell et al. (1996) Nature 380: 64-66), mice (Wakayamaand Yanagimachi (1999) Nat. Genet. 22: 127-128), goats (Baguisi et al. (1999) Nat. Biotechnol. 17: 456-461), monkeys (Meng et al. (1997) Biol. Reprod. 57: 454-459), and pigs (Bishop et al. (2000) Nature Biotechnology 18: 1055-1059). Nuclear transfer methods have also been used to produce clones of transgenic animals. Thus, for example, the production of transgenic goats carrying the human antithrobin III gene by somatic cell nuclear transfer has been reported (Baguisi et al. (1999) Nature Biotechnology 17: 456-461).

[0107] Using methods of nuclear transfer as describe in these and other references, cell nuclei derived from differentiated fetal or adult, mammalian cells are transplanted into enucleated mammalian oocytes of the same species as the donor nuclei. The nuclei are reprogrammed to direct the development of cloned embryos, which can then be transferred into recipient females to produce fetuses and offspring, or used to produce cultured inner cell mass (CICM) cells. The cloned embryos can also be combined with fertilized embryos to produce chimeric embryos, fetuses and/or offspring.

[0108] Somatic cell nuclear transfer also allows simplification of transgenic procedures by working with a differentiated cell source that can be clonally propagated. This eliminates the need to maintain the cells in an undifferentiated state, thus, genetic modifications, both random integration and gene targeting, are more easily accomplished. Also by combining nuclear transfer with the ability to modify and select for these cells in vitro, this procedure is more efficient than previous transgenic embryo techniques.

[0109] Nuclear transfer techniques or nuclear transplantation techniques are known in the literature. See, in particular, Campbell et al. (1995) Theriogenology, 43:181; Collas et al. (1994) Mol. Report Dev., 38:264-267; Keefer et al. (1994) Biol. Reprod., 50:935-939; Sims et al. (1993) Proc. Natl. Acad. Sci., USA, 90:6143-6147; WO 94/26884; WO 94/24274, WO 90/03432, U.S. Pat. Nos. 5,945,577, 4,944,384, 5,057,420 and the like.

[0110] Having shown that disruption of the Socs2 gene produces a high-growth (hg) phenotype, and that hg animals are viable, one of skill will recognize that there are a wide number of animals including natural and transgenic animals that have other desirable phenotypes and that can be used to practice the invention by use of ES cells and/or somatic nuclear transfer. Preferred animals are mammals including, but not limited to porcine, cows, cattle, goats, sheep, canines, felines, largomorphs, rodents, murines, primates (especially non-human primates), and the like.

[0111] E) Intrabodies

[0112] In still another embodiment, Socs2 expression/activity can be inhibited by transfecting the subject cell(s) (e.g., cells of the vascular endothelium) with a nucleic acid construct that expresses an intrabody. An intrabody is an intracellular antibody, in this case, capable of recognizing and binding to a Socs2 polypeptide. The intrabody is expressed by an “antibody cassette”, containing a sufficient number of nucleotides coding for the portion of an antibody capable of binding to the target (Socs2 polypeptide) operably linked to a promoter that will permit expression of the antibody in the cell(s) of interest. The construct encoding the intrabody is delivered to the cell where the antibody is expressed intracellularly and binds to the target Socs2, thereby disrupting the target from its normal action. This antibody is sometimes referred to as an “intrabody”.

[0113] In one preferred embodiment, the “intrabody gene” (antibody) of the antibody cassette would utilize a cDNA, encoding heavy chain variable (V_{H}) and light chain variable (V_{L}) domains of an antibody which can be connected at the DNA level by an appropriate oligonucleotide as a bridge of the two variable domains, which on translation, form a single peptide (referred to as a single chain variable fragment, “sFv”) capable of binding to a target such as an Socs2 protein. The intrabody gene preferably does not encode an operable secretory sequence and thus the expressed antibody remains within the cell.

[0114] Anti-Socs2 antibodies suitable for use/expression as intrabodies in the methods of this invention can be readily produced by a variety of methods. Such methods include, but are not limited to, traditional methods of raising “whole” polyclonal antibodies, which can be modified to form single chain antibodies, or screening of, e.g. phage display libraries to select for antibodies showing high specificity and/or avidity for Socs2. Such screening methods are described above in some detail.

[0115] The antibody cassette is delivered to the cell by any of the known means. One preferred delivery system is described in U.S. Pat. No. 6,004,940. Methods of making and using intrabodies are described in detail in U.S. Pat. Nos. 6,072,036, 6,004,940, and 5,965,371.

[0116] F) Small organic molecules

[0117] In still another embodiment, Socs2 expression and/or Socs2 protein activity can be inhibited by the use of small organic molecules. Such molecules include, but are not limited to molecules that specifically bind to the DNA comprising the Socs2 promoter and/or coding region, molecules that bind to and complex with Socs2 mRNA, molecules that inhibit the signaling pathway that results in Socs2 upregulation, and molecules that bind to and/or compete with Socs2 polypeptides. Small organic molecules effective at inhibiting Socs2 expression can be identified with routine screening using the methods described herein.

[0118] The methods of inhibiting Socs2 expression described above are meant to be illustrative and not limiting. In view of the teachings provided herein, other methods of inhibiting Socs2 will be known to those of skill in the art.

[0119] G) Zinc finger proteins as designer transcription factors to activate or repress gene expression

[0120] The ability to specifically manipulate the expression of endogenous genes have wide-ranging applications for medicine and experimental and applied biology. Nature's control mechanisms of gene activation and repression center around transcription factors that function to direct the localization of enzymes to specific DNA addresses. Exploiting this fundamental principle for imposed control of gene expression involves the utilization of sequence-specific DNA-binding domains. Of the DNA-binding motifs that have been studied, the modular zinc finger DNA-binding domains of the Cys₂-His₂ type have shown the most promise for the development of a universal system for gene regulation. Design studies and phage-based selections have shown that this motif is adaptable to the recognition of a wide variety of DNA sequences, often with exquisite specificity (Segal et al. (1999) Proc. Natl. Acad. Sci., USA, 96: 2758-2763). Recently, a family of zinc finger domains has been described that is sufficient for the construction of 17 million novel proteins that bind the 5′-(GNN)₆-3′ family of DNA sequences. These domains are functionally modular and may be recombined with one another to create polydactyl proteins capable of binding 18-bp sequences with the potential for genome-specific addressing (Beerli et al. (1998) Proc. Natl. Acad. Sci., USA, 95:14628-14633).

[0121] It has been shown that transcription factors designed to bind in the transcribed regions of either erbB-2 or erbB-3 genes, which are involved in human cancers, are capable of selectively up- or down-regulating expression of their respective target gene (Beerli et al. (2000) Proc. Natl. Acad. Sci, USA, 97: 1495-1500). A number of reports describe the details of this technology (see, e.g., Beerli et al. (2000) Proc. Natl. Acad. Sci., USA, 97: 1495-1500; Wang and Pabo (1999) Proc. Natl. Acad. Sci., USA, 96: 9568-9573; Beerli et al. (1998) Proc. Natl. Acad. Sci., USA, 95: 14628-14633; Kim et al. (1997) Proc. Natl. Acad. Sci., USA, 94: 3616-3620), which essentially consists of designing a construct expressing a zinc-finger proteins capable of recognizing and binding to regulatory sequences in the promoter of a gene that will permit activation or repression of gene expression. It has been demonstrated that constructs of this kind can regulate gene expression by stable or transient transfection in various mammalian cell lines (Kang and Kim (2000) J. Biol. Chem., 275 :8742-8748).

[0122] In the present invention the Socs2 gene can be targeted using a zinc-finger designed transcription factor protein in-vivo to repress expression of the gene, e.g, in mice. These methods can also be used to provide in-vitro cell culture system, e.g. to test the effect of repressing the expression of Socs2 various mammalian organisms, tissues, and cells. In certain embodiments, the in-vitro approach can be implemented utilizing cells from various species, such a bovine or chicken cells. The in-vitro system also provides a phenotypic assay to ascertain the modulation of GH and IGF1 in relation to the expression of Socs2.

[0123] H) Modes of administration

[0124] The mode of administration of the Socs2 blocking agent depends on the nature of the particular agent. Antisense molecules, catalytic RNAs (ribozymes), catalytic DNAs, small organic molecules, RNAi, and other molecules (e.g. lipids, antibodies, etc.) used as Socs2 inhibitors may be formulated as pharmaceuticals (e.g. with suitable excipient) and delivered using standard pharmaceutical formulation and delivery methods as described below. Antisense molecules, catalytic RNAs (ribozymes), catalytic DNAs, and additionally, knockout constructs, and constructs encoding intrabodies can be delivered and (if necessary) expressed in target cells (e.g. vascular endothelial cells) using methods of gene therapy, e.g. as described below.

[0125] 1) “Pharmaceutical” formulations

[0126] In order to carry out the methods of the invention, one or more inhibitors of Socs2 expression (e.g. ribozymes, antibodies, antisense molecules, small organic molecules, etc.) are administered to a cell, tissue, or organism, to induce a high growth (hg) phenotype. Various inhibitors may be administered, if desired, in the form of salts, esters, amides, prodrugs, derivatives, and the like, provided the salt, ester, amide, prodrug or derivative is suitable pharmacologically, i.e., effective in the present method. Salts, esters, amides, prodrugs and other derivatives of the active agents may be prepared using standard procedures known to those skilled in the art of synthetic organic chemistry and described, for example, by March (1992) Advanced Organic Chemistry; Reactions, Mechanisms and Structure, 4th Ed. N.Y. Wiley-Interscience.

[0127] The Socs2 inhibitors and various derivatives and/or formulations thereof are useful for parenteral, topical, oral, or local administration, such as by aerosol or transdermally, for prophylactic and/or therapeutic treatment of undergrowth disorders or overgrowth disorders, such as cases of uncontrolled cell proliferation which are the causal factor in tumor development. The pharmaceutical compositions can be administered in a variety of unit dosage forms depending upon the method of administration. Suitable unit dosage forms, include, but are not limited to powders, tablets, pills, capsules, lozenges, suppositories, implants etc.

[0128] The Socs2 inhibitors and various derivatives and/or formulations thereof are typically combined with a pharmaceutically acceptable carrier (excipient) to form a pharmacological composition. Pharmaceutically acceptable carriers can contain one or more physiologically acceptable compound(s) that act, for example, to stabilize the composition or to increase or decrease the absorption of the active agent(s). Physiologically acceptable compounds can include, for example, carbohydrates, such as glucose, sucrose, or dextrans, antioxidants, such as ascorbic acid or glutathione, chelating agents, low molecular weight proteins, compositions that reduce the clearance or hydrolysis of the active agents, or excipients or other stabilizers and/or buffers.

[0129] Other physiologically acceptable compounds include wetting agents, emulsifying agents, dispersing agents or preservatives which are particularly useful for preventing the growth or action of microorganisms. Various preservatives are well known and include, for example, phenol and ascorbic acid. One skilled in the art would appreciate that the choice of pharmaceutically acceptable carrier(s), including a physiologically acceptable compound depends, for example, on the route of administration of the active agent(s) and on the particular physio-chemical characteristics of the active agent(s). The excipients are preferably sterile and generally free of undesirable matter. These compositions may be sterilized by conventional, well known sterilization techniques.

[0130] The concentration of active agent(s) in the formulation can vary widely, and will be selected primarily based on fluid volumes, viscosities, body weight and the like in accordance with the particular mode of administration selected and the patient's needs. Typically, the active agent(s) are administered in an amount sufficient to alter expression of Socs2, i.e., an “effective amount”. Single or multiple administrations of the compositions may be administered depending on the dosage and frequency as required and tolerated by the organism or cell or tissue system. In any event, the composition should provide a sufficient quantity of the active agents of this invention to effectively alter Socs2 expression and preferably to induce or reduce an hg phenotype.

[0131] 2) “Genetic” delivery methods

[0132] As indicated above, antisense molecules, catalytic RNAs (ribozymes), catalytic DNAs, RNAi, and additionally, knockout constructs, and constructs encoding intrabodies can be delivered and transcribed and/or expressed in target cells (e.g. vascular endothelial cells) using methods of gene therapy. Thus, in certain preferred embodiments, the nucleic acids encoding knockout constructs, intrabodies, antisense molecules, catalytic RNAs or DNAs, etc. are cloned into gene therapy vectors that are competent to transfect cells (such as human or other mammalian cells) in vitro and/or in vivo.

[0133] Many approaches for introducing nucleic acids into cells in vivo, ex vivo and in vitro are known. These include lipid or liposome based gene delivery (WO 96/18372; WO 93/24640; Mannino and Gould-Fogerite (1988) BioTechniques 6(7): 682-691; Rose U.S. Pat. No. 5,279,833; WO 91/06309; and Felgner et al. (1987) Proc. Natl. Acad. Sci. USA 84: 7413-7414) and replication-defective retroviral vectors harboring a therapeutic polynucleotide sequence as part of the retroviral genome (see, e.g., Miller et al. (1990) Mol. Cell. Biol. 10:4239 (1990); Kolberg (1992) J. NIH Res. 4: 43, and Cornetta et al. (1991) Hum. Gene Ther. 2: 215).

[0134] For a review of gene therapy procedures, see, e.g., Anderson, Science (1992) 256: 808-813; Nabel and Felgner (1993) TIBTECH 11: 211-217; Mitani and Caskey (1993) TIBTECH 11: 162-166; Mulligan (1993) Science, 926-932; Dillon (1993) TIBTECH 11: 167-175; Miller (1992) Nature 357: 455-460; Van Brunt (1988) Biotechnology 6(10): 1149-1154; Vigne (1995) Restorative Neurology and Neuroscience 8: 35-36; Kremer and Perricaudet (1995) British Medical Bulletin 51(1) 31-44; Haddada et al. (1995) in Current Topics in Microbiology and Immunology, Doerfler and Böhm (eds) Springer-Verlag, Heidelberg Germany; and Yu et al., (1994) Gene Therapy, 1:13-26.

[0135] Widely used vector systems include, but are not limited to adenovirus, adeno associated virus, and various retroviral expression systems. The use of adenoviral vectors is well known to those of skill and is described in detail, e.g., in WO 96/25507. Particularly preferred adenoviral vectors are described by Wills et al. (1994) Hum. Gene Therap. 5: 1079-1088.

[0136] Adeno-associated virus (AAV)-based vectors used to transduce cells with target nucleic acids, e.g., in the in vitro production of nucleic acids and peptides, and in in vivo and ex vivo gene therapy procedures are describe, for example, by West et al. (1987) Virology 160:38-47; Carter et al. (1989) U.S. Pat. No. 4,797,368; Carter et al. WO 93/24641 (1993); Kotin (1994) Human Gene Therapy 5:793-801; Muzyczka (1994) J. Clin. Invst. 94:1351 for an overview of AAV vectors. Lebkowski, U.S. Pat. No. 5,173,414; Tratschin et al. (1985) Mol. Cell. Biol. 5(11):3251-3260; Tratschin, et al. (1984) Mol. Cell. Biol., 4: 2072-2081; Hermonat and Muzyczka (1984) Proc. Natl. Acad. Sci. USA, 81: 6466-6470; McLaughlin et al. (1988) and Samulski et al. (1989) J. Virol, 63:03822-3828. Cell lines that can be transformed by rAAV include those described in Lebkowski et al. (1988) Mol. Cell. Biol., 8:3988-3996.

[0137] Widely used retroviral vectors include those based upon murine leukemia virus (MuLV), gibbon ape leukemia virus (GaL V), Simian Immunodeficiency virus (SIV), human immunodeficiency virus (HIV), alphavirus, and combinations thereof (see, e.g., Buchscher et al. (1992) J. Virol. 66(5) 2731-2739; Johann et al. (1992) J. Virol. 66 (5):1635-1640 (1992); Sommerfelt et al., (1990) Virol. 176:58-59; Wilson et al. (1989) J. Virol. 63:2374-2378; Miller et al., J. Virol. 65:2220-2224 (1991); Wong-Staal et al., PCT/US94/05700, and Rosenburg and Fauci (1993) in Fundamental Immunology, Third Edition Paul (ed) Raven Press, Ltd., New York and the references therein, and Yu et al. (1994) Gene Therapy, supra; U.S. Pat. No. 6,008,535, and the like). Other suitable viral vectors include, but are not limited to herpes virus, lentivirus, and vaccinia virus.

[0138] Alone, or in combination with viral vectors, a number of non-viral vectors are also useful for transfecting cells to express constructs that block or inhibit Socs2 expression. Suitable non-viral vectors include, but are not limited to, plasmids, cosmids, phagemids, liposomes, water-oil emulsions, polethylene imines, biolistic pellets/beads, and dendrimers.

[0139] Liposomes were first described in 1965 as a model of cellular membranes and quickly were applied to the delivery of substances to cells. Liposomes entrap DNA by one of two mechanisms which has resulted in their classification as either cationic liposomes or pH-sensitive liposomes. Cationic liposomes are positively charged liposomes which interact with the negatively charged DNA molecules to form a stable complex. Cationic liposomes typically consist of a positively charged lipid and a co-lipid. Commonly used co-lipids include dioleoyl phosphatidylethanolamine (DOPE) or dioleoyl phosphatidylcholine (DOPC). Co-lipids, also called helper lipids, are in most cases required for stabilization of liposome complex. A variety of positively charged lipid formulations are commercially available and many other are under development. Two of the most frequently cited cationic lipids are lipofectamine and lipofectin. Lipofectin is a commercially available cationic lipid first reported by Phil Felgner in 1987 to deliver genes to cells in culture. Lipofectin is a mixture of N-[1-(2, 3-dioleyloyx) propyl]-N-N-N-trimethyl ammonia chloride (DOTMA) and DOPE.

[0140] DNA and lipofectin or lipofectamine interact spontaneously to form complexes that have a 100% loading efficiency. In other words, essentially all of the DNA is complexed with the lipid, provided enough lipid is available. It is assumed that the negative charge of the DNA molecule interacts with the positively charged groups of the DOTMA. The lipid:DNA ratio and overall lipid concentrations used in forming these complexes are extremely important for efficient gene transfer and vary with application. Lipofectin has been used to deliver linear DNA, plasmid DNA, and RNA to a variety of cells in culture. Shortly after its introduction, it was shown that lipofectin could be used to deliver genes in vivo. Following intravenous administration of lipofectin-DNA complexes, both the lung and liver showed marked affinity for uptake of these complexes and transgene expression. Injection of these complexes into other tissues has had varying results and, for the most part, are much less efficient than lipofectin-mediated gene transfer into either the lung or the liver.

[0141] PH-sensitive, or negatively-charged liposomes, entrap DNA rather than complex with it. Since both the DNA and the lipid are similarly charged, repulsion rather than complex formation occurs. Yet, some DNA does manage to get entrapped within the aqueous interior of these liposomes. In some cases, these liposomes are destabilized by low pH and hence the term pH-sensitive. To date, cationic liposomes have been much more efficient at gene delivery both in vivo and in vitro than pH-sensitive liposomes. pH-sensitive liposomes have the potential to be much more efficient at in vivo DNA delivery than their cationic counterparts and should be able to do so with reduced toxicity and interference from serum protein.

[0142] In another approach dendrimers complexed to the DNA have been used to transfect cells. Such dendrimers include, but are not limited to, “starburst” dendrimers and various dendrimer polycations.

[0143] Dendrimer polycations are three dimensional, highly ordered oligomeric and/or polymeric compounds typically formed on a core molecule or designated initiator by reiterative reaction sequences adding the oligomers and/or polymers and providing an outer surface that is positively changed. These dendrimers may be prepared as disclosed in PCT/US83/02052, and U.S. Pat. Nos. 4,507,466, 4,558,120, 4,568,737, 4,587,329, 4,631,337, 4,694,064, 4,713,975, 4,737,550, 4,871,779, 4,857,599.

[0144] Typically, the dendrimer polycations comprise a core molecule upon which polymers are added. The polymers may be oligomers or polymers which comprise terminal groups capable of acquiring a positive charge. Suitable core molecules comprise at least two reactive residues which can be utilized for the binding of the core molecule to the oligomers and/or polymers. Examples of the reactive residues are hydroxyl, ester, amino, imino, imido, halide, carboxyl, carboxyhalide maleimide, dithiopyridyl, and sulfhydryl, among others. Preferred core molecules are ammonia, tris-(2-aminoethyl)amine, lysine, ornithine, pentaerythritol and ethylenediamine, among others. Combinations of these residues are also suitable as are other reactive residues.

[0145] Oligomers and polymers suitable for the preparation of the dendrimer polycations of the invention are pharmaceutically-acceptable oligomers and/or polymers that are well accepted in the body. Examples of these are polyamidoamines derived from the reaction of an alkyl ester of an α,β-ethylenically unsaturated carboxylic acid or an α,β-ethylenically unsaturated amide and an alkylene polyamine or a polyalkylene polyamine, among others. Preferred are methyl acrylate and ethylenediamine. The polymer is preferably covalently bound to the core molecule.

[0146] The terminal groups that may be attached to the oligomers and/or polymers should be capable of acquiring a positive charge. Examples of these are azoles and primary, secondary, tertiary and quaternary aliphatic and aromatic amines and azoles, which may be substituted with S or O, guanidinium, and combinations thereof. The terminal cationic groups are preferably attached in a covalent manner to the oligomers and/or polymers. Preferred terminal cationic groups are amines and guanidinium. However, others may also be utilized. The terminal cationic groups may be present in a proportion of about 10 to 100% of all terminal groups of the oligomer and/or polymer, and more preferably about 50 to 100%.

[0147] The dendrimer polycation may also comprise 0 to about 90% terminal reactive residues other than the cationic groups. Suitable terminal reactive residues other than the terminal cationic groups are hydroxyl, cyano, carboxyl, sulfhydryl, amide and thioether, among others, and combinations thereof. However others may also be utilized.

[0148] The dendrimer polycation is generally and preferably non-covalently associated with the polynucleotide. This permits an easy disassociation or disassembling of the composition once it is delivered into the cell. Typical dendrimer polycation suitable for use herein have a molecular weight ranging from about 2,000 to 1,000,000 Da, and more preferably about 5,000 to 500,000 Da. However, other molecule weights are also suitable. Preferred dendrimer polycations have a hydrodynamic radius of about 11 to 60 Å., and more preferably about 15 to 55 Å. Other sizes, however, are also suitable. Methods for the preparation and use of dendrimers in gene therapy are well known to those of skill in the art and describe in detail, for example, in U.S. Pat. No. 5,661,025

[0149] Where appropriate, two or more types of vectors can be used together. For example, a plasmid vector may be used in conjunction with liposomes. In the case of non-viral vectors, nucleic acid may be incorporated into the non-viral vectors by any suitable means known in the art. For plasmids, this typically involves ligating the construct into a suitable restriction site. For vectors such as liposomes, water-oil emulsions, polyethylene amines and dendrimers, the vector and construct may be associated by mixing under suitable conditions known in the art.

[0150] II. Assays for agents that modulate Socs2 expression

[0151] As indicated above, in one aspect, this invention pertains to the discovery that Socs2 inhibition or inactivation results in an hg (high-growth) phenotype. The Socs2 gene, or gene product(s) (e.g. mRNA, protein, etc.) provide good targets to screen for new agents that modulate Socs2 expression or activity and hence the development of an hg phenotype. Thus, in one embodiment, this invention provides methods of screening for agents that modulate Socs2 expression and/or activity. The methods preferably involve detecting a change in the expression level and/or activity level of a Socs2gene or gene product (e.g. Socs2 protein) in cell(s) contacted with the test agent in question. An elevated Socs2 expression level or activity level in the presence of the agent, e.g., as compared to a negative control where the test agent is absent or at reduced concentration indicates that the agent upregulates Socs2 activity or expression. Conversely, decreased Socs2 expression level or activity level in the presence of the agent as compared to a negative control where the test agent is absent or at reduced concentration indicates that the agent down-regulates Socs2 activity or expression

[0152] Expression levels of a gene can be altered by changes in the transcription of the gene product (i.e. transcription of mRNA), and/or by changes in translation of the gene product (i.e. translation of the protein), and/or by post-translational modification(s) (e.g. protein folding, glycosylation, etc.). Thus preferred assays of this invention include assaying for level of transcribed mRNA (or other nucleic acids derived from the Socs2 gene), level of translated protein, activity of translated protein, etc. Examples of such approaches are described below.

[0153] A) Nucleic-acid based assays

[0154] 1) Target molecules

[0155] Changes in expression level can be detected by measuring changes in mRNA and/or a nucleic acid derived from the mRNA (e.g. reverse-transcribed cDNA, etc.). In order to measure the Socs2 expression level it is desirable to provide a nucleic acid sample for such analysis. In preferred embodiments, the nucleic acid is found in or derived from a biological sample. The term “biological sample”, as used herein, refers to a sample obtained from an organism or from components (e.g., cells) of an organism. The sample may be of any biological tissue or fluid. Biological samples may also include organs or sections of tissues such as frozen sections taken for histological purposes.

[0156] The nucleic acid (e.g., mRNA nucleic acid derived from mRNA) is, in certain preferred embodiments, isolated from the sample according to any of a number of methods well known to those of skill in the art. Methods of isolating mRNA are well known to those of skill in the art. For example, methods of isolation and purification of nucleic acids are described in detail in by Tijssen ed., (1993) Chapter 3 of Laboratory Techniques in Biochemistry and Molecular Biology: Hybridization With Nucleic Acid Probes, Part I. Theory and Nucleic Acid Preparation, Elsevier, N.Y. and Tijssen ed.

[0157] In a preferred embodiment, the “total” nucleic acid is isolated from a given sample using, for example, an acid guanidinium-phenol-chloroform extraction method and polyA+mRNA is isolated by oligo dT column chromatography or by using (dT)n magnetic beads (see, e.g., Sambrook et al., Molecular Cloning: A Laboratory Manual (2nd ed.), Vols. 1-3, Cold Spring Harbor Laboratory, (1989), or Current Protocols in Molecular Biology, F. Ausubel et al., ed. Greene Publishing and Wiley-Interscience, New York (1987)).

[0158] Frequently, it is desirable to amplify the nucleic acid sample prior to assaying for expression level. Methods of amplifying nucleic acids are well known to those of skill in the art and include, but are not limited to polymerase chain reaction (PCR, see. e.g. Innis, et al., (1990) PCR Protocols. A guide to Methods and Application. Academic Press, Inc. San Diego,), ligase chain reaction (LCR) (see Wu and Wallace (1989) Genomics 4: 560, Landegren et al. (1988) Science 241: 1077, and Barringer et al. (1990) Gene 89: 117, transcription amplification (Kwoh et al. (1989) Proc. Natl. Acad. Sci. USA 86: 1173), self-sustained sequence replication (Guatelli et al. (1990) Proc. Nat. Acad. Sci. USA 87: 1874), dot PCR, and linker adapter PCR, etc).

[0159] In a particularly preferred embodiment, where it is desired to quantify the transcription level (and thereby expression) of Socs2 in a sample, the nucleic acid sample is one in which the concentration of the Socs2 mRNA transcript(s), or the concentration of the nucleic acids derived from the Socs2 mRNA transcript(s), is proportional to the transcription level (and therefore expression level) of that gene. Similarly, it is preferred that the hybridization signal intensity be proportional to the amount of hybridized nucleic acid. While it is preferred that the proportionality be relatively strict (e.g., a doubling in transcription rate results in a doubling in mRNA transcript in the sample nucleic acid pool and a doubling in hybridization signal), one of skill will appreciate that the proportionality can be more relaxed and even non-linear. Thus, for example, an assay where a 5 fold difference in concentration of the target mRNA results in a 3 to 6 fold difference in hybridization intensity is sufficient for most purposes.

[0160] Where more precise quantification is required, appropriate controls can be run to correct for variations introduced in sample preparation and hybridization as described herein. In addition, serial dilutions of “standard” target nucleic acids (e.g., mRNAs) can be used to prepare calibration curves according to methods well known to those of skill in the art. Of course, where simple detection of the presence or absence of a transcript or large differences of changes in nucleic acid concentration is desired, no elaborate control or calibration is required.

[0161] In the simplest embodiment, the Socs2-containing nucleic acid sample is the total mRNA or a total cDNA isolated and/or otherwise derived from a biological sample. The nucleic acid may be isolated from the sample according to any of a number of methods well known to those of skill in the art as indicated above.

[0162] 2) Hybridization-based assays

[0163] Using the Socs2 sequences provided herein, detecting and/or quantifying the Socs2 transcript(s) can be routinely accomplished using nucleic acid hybridization techniques (see, e.g., Sambrook et al. supra). For example, one method for evaluating the presence, absence, or quantity of Socs2 reverse-transcribed cDNA involves a “Southern Blot”. In a Southern Blot, the DNA (e.g., reverse-transcribed Socs2 mRNA), typically fragmented and separated on an electrophoretic gel, is hybridized to a probe specific for Socs2 (or to a mutant thereof). Comparison of the intensity of the hybridization signal from the Socs2 probe with a “control” probe (e.g. a probe for a “housekeeping gene) provides an estimate of the relative expression level of the target nucleic acid.

[0164] Alternatively, the Socs2 mRNA can be directly quantified in a Northern blot. In brief, the mRNA is isolated from a given cell sample using, for example, an acid guanidinium-phenol-chloroform extraction method. The mRNA is then electrophoresed to separate the mRNA species and the mRNA is transferred from the gel to a nitrocellulose membrane. As with the Southern blots, labeled probes are used to identify and/or quantify the target Socs2 mRNA. Appropriate controls (e.g. probes to housekeeping genes) provide a reference for evaluating relative expression level.

[0165] An alternative means for determining the Socs2 expression level is in situ hybridization. In situ hybridization assays are well known (e.g., Angerer (1987) Meth. Enzymol 152: 649). Generally, in situ hybridization comprises the following major steps: (1) fixation of tissue or biological structure to be analyzed; (2) prehybridization treatment of the biological structure to increase accessibility of target DNA, and to reduce nonspecific binding; (3) hybridization of the mixture of nucleic acids to the nucleic acid in the biological structure or tissue; (4) post-hybridization washes to remove nucleic acid fragments not bound in the hybridization and (5) detection of the hybridized nucleic acid fragments. The reagent used in each of these steps and the conditions for use vary depending on the particular application.

[0166] In some applications, it is necessary to block the hybridization capacity of repetitive sequences. Thus, in some embodiments, tRNA, human genomic DNA, or Cot-1 DNA is used to block non-specific hybridization.

[0167] 3) Amplification-based assays

[0168] In another embodiment, amplification-based assays can be used to measure Socs2 expression (transcription) level. In such amplification-based assays, the target nucleic acid sequences (i.e., Socs2) act as template(s) in amplification reaction(s) (e.g. Polymerase Chain Reaction (PCR) or reverse-transcription PCR (RT-PCR)). In a quantitative amplification, the amount of amplification product will be proportional to the amount of template (e.g., Socs2 mRNA) in the original sample. Comparison to appropriate (e.g. healthy tissue or cells unexposed to the test agent) controls provides a measure of the Socs2 transcript level.

[0169] Methods of “quantitative” amplification are well known to those of skill in the art. For example, quantitative PCR involves simultaneously co-amplifying a known quantity of a control sequence using the same primers. This provides an internal standard that may be used to calibrate the PCR reaction. Detailed protocols for quantitative PCR are provided in Innis et al. (1990) PCR Protocols, A Guide to Methods and Applications, Academic Press, Inc. N.Y.). One approach, for example, involves simultaneously co-amplifying a known quantity of a control sequence using the same primers as those used to amplify the target. This provides an internal standard that may be used to calibrate the PCR reaction.

[0170] One preferred internal standard is a synthetic AW106 cRNA. The AW106 cRNA is combined with RNA isolated from the sample according to standard techniques known to those of skill in the art. The RNA is then reverse transcribed using a reverse transcriptase to provide copy DNA. The cDNA sequences are then amplified (e.g., by PCR) using labeled primers. The amplification products are separated, typically by electrophoresis, and the amount of labeled nucleic acid (proportional to the amount of amplified product) is determined. The amount of mRNA in the sample is then calculated by comparison with the signal produced by the known AW106 RNA standard. Detailed protocols for quantitative PCR are provided in PCR Protocols, A Guide to Methods and Applications, Innis et al. (1990) Academic Press, Inc. N.Y.. The known nucleic acid sequence(s) for Socs2 are sufficient to enable one of skill to routinely select primers to amplify any portion of the gene.

[0171] 4) Hybridization formats and optimization of hybridization conditions

[0172] a) Array-based hybridization formats

[0173] In one embodiment, the methods of this invention can be utilized in array-based hybridization formats. Arrays are a multiplicity of different “probe” or “target” nucleic acids (or other compounds) attached to one or more surfaces (e.g., solid, membrane, or gel). In a preferred embodiment, the multiplicity of nucleic acids (or other moieties) is attached to a single contiguous surface or to a multiplicity of surfaces juxtaposed to each other.

[0174] In an array format a large number of different hybridization reactions can be run essentially “in parallel.” This provides rapid, essentially simultaneous, evaluation of a number of hybridizations in a single “experiment”. Methods of performing hybridization reactions in array based formats are well known to those of skill in the art (see, e.g., Pastinen (1997) Genome Res. 7: 606-614; Jackson (1996) Nature Biotechnology 14:1685; Chee (1995) Science 274: 610; WO 96/17958, Pinkel et al. (1998) Nature Genetics 20: 207-211).

[0175] Arrays, particularly nucleic acid arrays can be produced according to a wide variety of methods well known to those of skill in the art. For example, in a simple embodiment, “low density” arrays can simply be produced by spotting (e.g by hand using a pipette) different nucleic acids at different locations on a solid support (e.g a glass surface, a membrane, etc.).

[0176] This simple spotting, approach has been automated to produce high density spotted arrays (see, e.g., U.S. Pat. No: 5,807,522). This patent describes the use of an automated system that taps a microcapillary against a surface to deposit a small volume of a biological sample. The process is repeated to generate high density arrays.

[0177] Arrays can also be produced using oligonucleotide synthesis technology. Thus, for example, U.S. Pat. No. 5,143,854 and PCT Patent Publication Nos. WO 90/15070 and 92/10092 teach the use of light-directed combinatorial synthesis of high density oligonucleotide arrays. Synthesis of high-density arrays is also described in U.S. Pat. Nos. 5,744,305, 5,800,992 and 5,445,934.

[0178] b) Other hybridization formats

[0179] As indicated above a variety of nucleic acid hybridization formats are known to those skilled in the art. For example, common formats include sandwich assays and competition or displacement assays. Such assay formats are generally described in Hames and Higgins (1985) Nucleic Acid Hybridization, A Practical Approach, IRL Press; Gall and Pardue (1969) Proc. Natl. Acad. Sci USA 63: 378-383; and John et al. (1969) Nature 223: 582-587.

[0180] Sandwich assays are commercially useful hybridization assays for detecting or isolating nucleic acid sequences. Such assays utilize a “capture” nucleic acid covalently immobilized to a solid support and a labeled “signal” nucleic acid in solution. The sample will provide the target nucleic acid. The “capture” nucleic acid and “signal” nucleic acid probe hybridize with the target nucleic acid to form a “sandwich” hybridization complex. To be most effective, the signal nucleic acid should not hybridize with the capture nucleic acid.

[0181] Typically, labeled signal nucleic acids are used to detect hybridization. Complementary nucleic acids or signal nucleic acids may be labeled by any one of several methods typically used to detect the presence of hybridized polynucleotides. The most common method of detection is the use of autoradiography with ³H, ¹²⁵I, ³⁵S, ¹⁴C, or ³²P-labelled probes or the like. Other labels include ligands that bind to labeled antibodies, fluorophores, chemiluminescent agents, enzymes, and antibodies that can serve as specific binding pair members for a labeled ligand.

[0182] Detection of a hybridization complex may require the binding of a signal-generating complex to a duplex of target and probe polynucleotides or nucleic acids. Typically, such binding occurs through ligand and anti-ligand interactions as between a ligand-conjugated probe and an anti-ligand conjugated with a signal.

[0183] The sensitivity of the hybridization assays may be enhanced through use of a nucleic acid amplification system that multiplies the target nucleic acid being detected. Examples of such systems include the polymerase chain reaction (PCR) system and the ligase chain reaction (LCR) system. Other methods recently described in the art are the nucleic acid sequence based amplification (NASBAO, Cangene, Mississauga, Ontario) and Q Beta Replicase systems.

[0184] c) Optimization of hybridization conditions

[0185] Nucleic acid hybridization simply involves providing a denatured probe and target nucleic acid under conditions where the probe and its complementary target can form stable hybrid duplexes through complementary base pairing. The nucleic acids that do not form hybrid duplexes are then washed away leaving the hybridized nucleic acids to be detected, typically through detection of an attached detectable label. It is generally recognized that nucleic acids are denatured by increasing the temperature or decreasing the salt concentration of the buffer containing the nucleic acids, or in the addition of chemical agents, or the raising of the pH. Under low stringency conditions (e.g., low temperature and/or high salt and/or high target concentration) hybrid duplexes (e.g., DNA:DNA, RNA:RNA, or RNA:DNA) will form even where the annealed sequences are not perfectly complementary. Thus specificity of hybridization is reduced at lower stringency. Conversely, at higher stringency (e.g., higher temperature or lower salt) successful hybridization requires fewer mismatches.

[0186] One of skill in the art will appreciate that hybridization conditions may be selected to provide any degree of stringency. In a preferred embodiment, hybridization is performed at low stringency to ensure hybridization and then subsequent washes are performed at higher stringency to eliminate mismatched hybrid duplexes. Successive washes may be performed at increasingly higher stringency (e.g., down to as low as 0.25 X SSPE at 37° C. to 70° C.) until a desired level of hybridization specificity is obtained. Stringency can also be increased by addition of agents such as formamide. Hybridization specificity may be evaluated by comparison of hybridization to the test probes with hybridization to the various controls that can be present.

[0187] In general, there is a tradeoff between hybridization specificity (stringency) and signal intensity. Thus, in a preferred embodiment, the wash is performed at the highest stringency that produces consistent results and that provides a signal intensity greater than approximately 10% of the background intensity. Thus, in a preferred embodiment, the hybridized array may be washed at successively higher stringency solutions and read between each wash. Analysis of the data sets thus produced will reveal a wash stringency above which the hybridization pattern is not appreciably altered and which provides adequate signal for the particular probes of interest.

[0188] In a preferred embodiment, background signal is reduced by the use of a blocking reagent (e.g., tRNA, sperm DNA, cot-1 DNA, etc.) during the hybridization to reduce non-specific binding. The use of blocking agents in hybridization is well known to those of skill in the art (see, e.g., Chapter 8 in P. Tijssen, supra.)

[0189] Methods of optimizing hybridization conditions are well known to those of skill in the art (see, e.g., Tijssen (1993) Laboratory Techniques in Biochemistry and Molecular Biology, Vol. 24: Hybridization With Nucleic Acid Probes, Elsevier, N.Y.).

[0190] Optimal conditions are also a function of the sensitivity of label (e.g., fluorescence) detection for different combinations of substrate type, fluorochrome, excitation and emission bands, spot size and the like. Low fluorescence background surfaces can be used (see, e.g., Chu (1992) Electrophoresis 13:105-114). The sensitivity for detection of spots (“target elements”) of various diameters on the candidate surfaces can be readily determined by, e.g., spotting a dilution series of fluorescently end labeled DNA fragments. These spots are then imaged using conventional fluorescence microscopy. The sensitivity, linearity, and dynamic range achievable from the various combinations of fluorochrome and solid surfaces (e.g., glass, fused silica, etc.) can thus be determined. Serial dilutions of pairs of fluorochrome in known relative proportions can also be analyzed. This determines the accuracy with which fluorescence ratio measurements reflect actual fluorochrome ratios over the dynamic range permitted by the detectors and fluorescence of the substrate upon which the probe has been fixed.

[0191] d) Labeling and detection of nucleic acids

[0192] The probes used herein for detection of Socs2 expression levels can be full length or less than the full length of the Socs2 or mutants thereof. Shorter probes are empirically tested for specificity. Preferred probes are sufficiently long so as to specifically hybridize with the Socs2 target nucleic acid(s) under stringent conditions. The preferred size range is from about 20 bases to the length of the Socs2 mRNA, more preferably from about 30 bases to the length of the Socs2 mRNA, and most preferably from about 40 bases to the length of the Socs2 mRNA.

[0193] The probes are typically labeled, with a detectable label. Detectable labels suitable for use in the present invention include any composition detectable by spectroscopic, photochemical, biochemical, immunochemical, electrical, optical or chemical means. Useful labels in the present invention include biotin for staining with labeled streptavidin conjugate, magnetic beads (e.g., Dynabeads™), fluorescent dyes (e.g., fluorescein, texas red, rhodamine, green fluorescent protein, and the like, see, e.g., Molecular Probes, Eugene, Oreg., USA), radiolabels (e.g., ³H, ¹²⁵I, ³⁵S, ¹⁴C, or ³²P), enzymes (e.g., horse radish peroxidase, alkaline phosphatase and others commonly used in an ELISA), and calorimetric labels such as colloidal gold (e.g., gold particles in the 40-80 nm diameter size range scatter green light with high efficiency) or colored glass or plastic (e.g., polystyrene, polypropylene, latex, etc.) beads. Patents teaching the use of such labels include U.S. Pat. Nos. 3,817,837; 3,850,752; 3,939,350; 3,996,345; 4,277,437; 4,275,149; and 4,366,241.

[0194] A fluorescent label is preferred because it provides a very strong signal with low background. It is also optically detectable at high resolution and sensitivity through a quick scanning procedure. The nucleic acid samples can all be labeled with a single label, e.g., a single fluorescent label. Alternatively, in another embodiment, different nucleic acid samples can be simultaneously hybridized where each nucleic acid sample has a different label. For instance, one target could have a green fluorescent label and a second target could have a red fluorescent label. The scanning step will distinguish sites of binding of the red label from those binding the green fluorescent label. Each nucleic acid sample (target nucleic acid) can be analyzed independently from one another.

[0195] Suitable chromogens which can be employed include those molecules and compounds which absorb light in a distinctive range of wavelengths so that a color can be observed or, alternatively, which emit light when irradiated with radiation of a particular wave length or wave length range, e.g., fluorescers.

[0196] Desirably, fluorescent labels should absorb light above about 300 nm, preferably about 350 nm, and more preferably above about 400 nm, usually emitting at wavelengths greater than about 10 nm higher than the wavelength of the light absorbed. It should be noted that the absorption and emission characteristics of the bound dye can differ from the unbound dye. Therefore, when referring to the various wavelength ranges and characteristics of the dyes, it is intended to indicate the dyes as employed and not the dye which is unconjugated and characterized in an arbitrary solvent.

[0197] Fluorescers are generally preferred because by irradiating a fluorescer with light, one can obtain a plurality of emissions. Thus, a single label can provide for a plurality of measurable events.

[0198] Detectable signal can also be provided by chemiluminescent and bioluminescent sources. Chemiluminescent sources include a compound which becomes electronically excited by a chemical reaction and can then emit light which serves as the detectable signal or donates energy to a fluorescent acceptor. Alternatively, luciferins can be used in conjunction with luciferase or lucigenins to provide bioluminescence.

[0199] Spin labels are provided by reporter molecules with an unpaired electron spin which can be detected by electron spin resonance (ESR) spectroscopy. Exemplary spin labels include organic free radicals, transitional metal complexes, particularly vanadium, copper, iron, and manganese, and the like. Exemplary spin labels include nitroxide free radicals.

[0200] The label may be added to the target (sample) nucleic acid(s) prior to, or after the hybridization. So called “direct labels” are detectable labels that are directly attached to or incorporated into the target (sample) nucleic acid prior to hybridization. In contrast, so called “indirect labels” are joined to the hybrid duplex after hybridization. Often, the indirect label is attached to a binding moiety that has been attached to the target nucleic acid prior to the hybridization. Thus, for example, the target nucleic acid may be biotinylated before the hybridization. After hybridization, an avidin-conjugated fluorophore will bind the biotin bearing hybrid duplexes providing a label that is easily detected. For a detailed review of methods of labeling nucleic acids and detecting labeled hybridized nucleic acids see Laboratory Techniques in Biochemistry and Molecular Biology, Vol. 24: Hybridization With Nucleic Acid Probes, P. Tijssen, ed. Elsevier, N.Y., (1993)).

[0201] Fluorescent labels are easily added during an in vitro transcription reaction. Thus, for example, fluorescein labeled UTP and CTP can be incorporated into the RNA produced in an in vitro transcription.

[0202] The labels can be attached directly or through a linker moiety. In general, the site of label or linker-label attachment is not limited to any specific position. For example, a label may be attached to a nucleoside, nucleotide, or analogue, thereof at any position that does not interfere with detection or hybridization as desired. For example, certain Label-ON Reagents from Clontech (Palo Alto, Calif.) provide for labeling interspersed throughout the phosphate backbone of an oligonucleotide and for terminal labeling at the 3′ and 5′ ends. As shown for example herein, labels can be attached at positions on the ribose ring or the ribose can be modified and even eliminated as desired. The base moieties of useful labeling reagents can include those that are naturally occurring or modified in a manner that does not interfere with the purpose to which they are put. Modified bases include but are not limited to 7-deaza A and G, 7-deaza-8-aza A and G, and other heterocyclic moieties.

[0203] It will be recognized that fluorescent labels are not to be limited to single species organic molecules, but include inorganic molecules, multi-molecular mixtures of organic and/or inorganic molecules, crystals, heteropolymers, and the like. Thus, for example, CdSe-CdS core-shell nanocrystals enclosed in a silica shell can be easily derivatized for coupling to a biological molecule (Bruchez et al. (1998) Science, 281: 2013-2016). Similarly, highly fluorescent quantum dots (zinc sulfide-capped cadmium selenide) have been covalently coupled to biomolecules for use in ultrasensitive biological detection (Warren and Nie (1998) Science, 281: 2016-2018).

[0204] B) Polypeptide-based assays

[0205] 1) Assay formats

[0206] In addition to, or in alternative to, the detection of Socs2 nucleic acid expression level(s), alterations in expression of Socs2 can be detected and/or quantified by detecting and/or quantifying the amount and/or activity of translated Socs2 polypeptide.

[0207] 2) Detection of expressed protein

[0208] The polypeptide(s) encoded by the Socs2 gene can be detected and quantified by any of a number of methods well known to those of skill in the art. These may include analytic biochemical methods such as electrophoresis, capillary electrophoresis, high performance liquid chromatography (HPLC), thin layer chromatography (TLC), hyperdiffusion chromatography, and the like, or various immunological methods such as fluid or gel precipitin reactions, immunodiffusion (single or double), immunoelectrophoresis, radioimmunoassay (RIA), enzyme-linked immunosorbent assays (ELISAs), immunofluorescent assays, western blotting, and the like.

[0209] In one preferred embodiment, the Socs2 polypeptide(s) are detected/quantified in an electrophoretic protein separation (e.g. a 1- or 2-dimensional electrophoresis). Means of detecting proteins using electrophoretic techniques are well known to those of skill in the art (see generally, R. Scopes (1982) Protein Purification, Springer-Verlag, N.Y.; Deutscher, (1990) Methods in Enzymology Vol. 182: Guide to Protein Purification, Academic Press, Inc., N.Y.).

[0210] In another preferred embodiment, Western blot (immunoblot) analysis is used to detect and quantify the presence of polypeptide(s) of this invention in the sample. This technique generally comprises separating sample proteins by gel electrophoresis on the basis of molecular weight, transferring the separated proteins to a suitable solid support, (such as a nitrocellulose filter, a nylon filter, or derivatized nylon filter), and incubating the sample with the antibodies that specifically bind the target polypeptide(s).

[0211] The antibodies specifically bind to the target polypeptide(s) and may be directly labeled or alternatively may be subsequently detected using labeled antibodies (e.g., labeled sheep anti-mouse antibodies) that specifically bind to a domain of the antibody.

[0212] In preferred embodiments, the Socs2 polypeptide(s) are detected using an immunoassay. As used herein, an immunoassay is an assay that utilizes an antibody to specifically bind to the analyte (e.g., the target polypeptide(s)). The immunoassay is thus characterized by detection of specific binding of a polypeptide of this invention to an antibody as opposed to the use of other physical or chemical properties to isolate, target, and quantify the analyte.

[0213] Any of a number of well recognized immunological binding assays (see, e.g., U.S. Pat. Nos. 4,366,241; 4,376,110; 4,517,288; and 4,837,168) are well suited to detection or quantification of the polypeptide(s) identified herein.. For a review of the general immunoassays, see also Asai (1993) Methods in Cell Biology Volume 37: Antibodies in Cell Biology, Academic Press, Inc. New York; Stites & Terr (1991) Basic and Clinical Immunology 7th Edition.

[0214] Immunological binding assays (or immunoassays) typically utilize a “capture agent” to specifically bind to and often immobilize the analyte (Socs2 polypeptide). In preferred embodiments, the capture agent is an antibody.

[0215] Immunoassays also often utilize a labeling agent to specifically bind to and label the binding complex formed by the capture agent and the analyte. The labeling agent may itself be one of the moieties comprising the antibody/analyte complex. Thus, the labeling agent may be a labeled polypeptide or a labeled antibody that specifically recognizes the already bound target polypeptide. Alternatively, the labeling agent may be a third moiety, such as another antibody, that specifically binds to the capture agent/polypeptide complex.

[0216] Other proteins capable of specifically binding immunoglobulin constant regions, such as protein A or protein G may also be used as the label agent. These proteins are normal constituents of the cell walls of streptococcal bacteria. They exhibit a strong non-immunogenic reactivity with immunoglobulin constant regions from a variety of species (see, generally Kronval, et al. (1973) J. Immunol., 111: 1401-1406, and Akerstrom (1985) J. ImmunoL, 135: 2589-2542).

[0217] Preferred immunoassays for detecting the target polypeptide(s) are either competitive or noncompetitive. Noncompetitive immunoassays are assays in which the amount of captured analyte is directly measured. In one preferred “sandwich” assay, for example, the capture agents (antibodies) can be bound directly to a solid substrate where they are immobilized. These immobilized antibodies then capture the target polypeptide present in the test sample. The target polypeptide thus immobilized is then bound by a labeling agent, such as a second antibody bearing a label.

[0218] In competitive assays, the amount of analyte (Socs2 polypeptide) present in the sample is measured indirectly by measuring the amount of an added (exogenous) analyte displaced (or competed away) from a capture agent (antibody) by the analyte present in the sample. In one competitive assay, a known amount of, in this case, labeled polypeptide is added to the sample and the sample is then contacted with a capture agent. The amount of labeled polypeptide bound to the antibody is inversely proportional to the concentration of target polypeptide present in the sample.

[0219] In one particularly preferred embodiment, the antibody is immobilized on a solid substrate. The amount of target polypeptide bound to the antibody may be determined either by measuring the amount of target polypeptide present in a polypeptide /antibody complex, or alternatively by measuring the amount of remaining uncomplexed polypeptide.

[0220] The immunoassay methods of the present invention include an enzyme immunoassay (EIA) which utilizes, depending on the particular protocol employed, unlabeled or labeled (e.g., enzyme-labeled) derivatives of polyclonal or monoclonal antibodies or antibody fragments or single-chain antibodies that bind Socs2 polypeptide(s), either alone or in combination. In the case where the antibody that binds Socs2 polypeptide is not labeled, a different detectable marker, for example, an enzyme-labeled antibody capable of binding to the monoclonal antibody that binds the Socs2 polypeptide, may be employed. Any of the known modifications of EIA, for example, enzyme-linked immunoabsorbent assay (ELISA), may also be employed. As indicated above, also contemplated by the present invention are immunoblotting immunoassay techniques such as western blotting employing an enzymatic detection system.

[0221] The immunoassay methods of the present invention may also be other known immunoassay methods, for example, fluorescent immunoassays using antibody conjugates or antigen conjugates of fluorescent substances such as fluoresceine or rhodamine, latex agglutination with antibody-coated or antigen-coated latex particles, haemagglutination with antibody-coated or antigen-coated red blood corpuscles, and immunoassays employing an avidin-biotin or strepavidin-biotin detection systems, and the like.

[0222] The particular parameters employed in the immunoassays of the present invention can vary widely depending on various factors such as the concentration of antigen in the sample, the nature of the sample, the type of immunoassay employed and the like. Optimal conditions can be readily established by those of ordinary skill in the art. In certain embodiments, the amount of antibody that binds Socs2 polypeptides is typically selected to give 50% binding of detectable marker in the absence of sample. If purified antibody is used as the antibody source, the amount of antibody used per assay will generally range from about 1 ng to about 100 ng. Typical assay conditions include a temperature range of about 4° C. to about 45° C., preferably about 25° C. to about 37° C., and most preferably about 25° C., a pH value range of about 5 to 9, preferably about 7, and an ionic strength varying from that of distilled water to that of about 0.2M sodium chloride, preferably about that of 0.15M sodium chloride. Times will vary widely depending upon the nature of the assay, and generally range from about 0.1 minute to about 24 hours. A wide variety of buffers, for example PBS, may be employed, and other reagents such as salt to enhance ionic strength, proteins such as serum albumins, stabilizers, biocides and non-ionic detergents may also be included.

[0223] The assays of this invention are scored (as positive or negative or quantity of target polypeptide) according to standard methods well known to those of skill in the art. The particular method of scoring will depend on the assay format and choice of label. For example, a Western Blot assay can be scored by visualizing the colored product produced by the enzymatic label. A clearly visible colored band or spot at the correct molecular weight is scored as a positive result, while the absence of a clearly visible spot or band is scored as a negative. The intensity of the band or spot can provide a quantitative measure of target polypeptide concentration.

[0224] Antibodies for use in the various immunoassays described herein, are commercially available or can be produced as described below.

[0225] 3) Antibodies to Socs2 polypeptides

[0226] Either polyclonal or monoclonal antibodies may be used in the immunoassays of the invention described herein. Polyclonal antibodies are preferably raised by multiple injections (e.g. subcutaneous or intramuscular injections) of substantially pure polypeptides or antigenic polypeptides into a suitable non-human mammal. The antigenicity of the target peptides can be determined by conventional techniques to determine the magnitude of the antibody response of an animal that has been immunized with the peptide. Generally, the peptides that are used to raise antibodies for use in the methods of this invention should generally be those which induce production of high titers of antibody with relatively high affinity for target polypeptides encoded by Socs2 or variants thereof.

[0227] If desired, the immunizing peptide may be coupled to a carrier protein by conjugation using techniques that are well-known in the art. Such commonly used carriers which are chemically coupled to the peptide include keyhole limpet hemocyanin (KLH), thyroglobulin, bovine serum albumin (BSA), and tetanus toxoid. The coupled peptide is then used to immunize the animal (e.g. a mouse or a rabbit).

[0228] The antibodies are then obtained from blood samples taken from the mammal. The techniques used to develop polyclonal antibodies are known in the art (see, e.g., Methods of Enzymology, “Production of Antisera With Small Doses of Immunogen: Multiple Intradermal Injections”, Langone, et al. eds. (Acad. Press, 1981)). Polyclonal antibodies produced by the animals can be further purified, for example, by binding to and elution from a matrix to which the peptide to which the antibodies were raised is bound. Those of skill in the art will know of various techniques common in the immunology arts for purification and/or concentration of polyclonal antibodies, as well as monoclonal antibodies see, for example, Coligan, et al. (1991) Unit 9, Current Protocols in Immunology, Wiley Interscience).

[0229] Preferably, however, the antibodies produced will be monoclonal antibodies (“mAb's”). For preparation of monoclonal antibodies, immunization of a mouse or rat is preferred. The term “antibody” as used in this invention includes intact molecules as well as fragments thereof, such as, Fab and F(ab′)^{2′}, and/or single-chain antibodies (e.g. scFv) which are capable of binding an epitopic determinant. Also, in this context, the term “mab's of the invention” refers to monoclonal antibodies with specificity for a polypeptide encoded by Socs2.

[0230] The general method used for production of hybridomas secreting mAbs is well known (Kohler and Milstein (1975) Nature, 256:495). Briefly, as described by Kohler and Milstein the technique comprised isolating lymphocytes from regional draining lymph nodes of five separate cancer patients with either melanoma, teratocarcinoma or cancer of the cervix, glioma or lung, (where samples were obtained from surgical specimens), pooling the cells, and fusing the cells with SHFP-1. Hybridomas were screened for production of antibody which bound to cancer cell lines. Confirmation of specificity among mAb's can be accomplished using relatively routine screening techniques (such as the enzyme-linked immunosorbent assay, or “ELISA”) to determine the elementary reaction pattern of the mAb of interest.

[0231] Antibodies fragments, e.g. single chain antibodies (scFv or others), can also be produced/selected using phage display technology. The ability to express antibody fragments on the surface of viruses that infect bacteria (bacteriophage or phage) makes it possible to isolate a single binding antibody fragment, e.g., from a library of greater than 10¹⁰ nonbinding clones. To express antibody fragments on the surface of phage (phage display), an antibody fragment gene is inserted into the gene encoding a phage surface protein (e.g., pIII) and the antibody fragment-pIII fusion protein is displayed on the phage surface (McCafferty et al. (1990) Nature, 348: 552-554; Hoogenboom et al. (1991) Nucleic Acids Res. 19: 4133-4137).

[0232] Since the antibody fragments on the surface of the phage are functional, phage bearing antigen binding antibody fragments can be separated from non-binding phage by antigen affinity chromatography (McCafferty et al. (1990) Nature, 348: 552-554). Depending on the affinity of the antibody fragment, enrichment factors of 20 fold -1,000,000 fold are obtained for a single round of affinity selection. By infecting bacteria with the eluted phage, however, more phage can be grown and subjected to another round of selection. In this way, an enrichment of 1000 fold in one round can become 1,000,000 fold in two rounds of selection (McCafferty et al. (1990) Nature, 348: 552-554). Thus even when enrichments are low (Marks et al. (1991) J. Mol. Biol. 222: 581-597), multiple rounds of affinity selection can lead to the isolation of rare phage. Since selection of the phage antibody library on antigen results in enrichment, the majority of clones bind antigen after as few as three to four rounds of selection. Thus only a relatively small number of clones (several hundred) need to be analyzed for binding to antigen.

[0233] Human antibodies can be produced without prior immunization by displaying very large and diverse V-gene repertoires on phage (Marks et al. (1991) J. Mol. Biol. 222: 581-597). In one embodiment natural V_{H} and V_{L} repertoires present in human peripheral blood lymphocytes are were isolated from unimmunized donors by PCR. The V-gene repertoires were spliced together at random using PCR to create a scFv gene repertoire which is was cloned into a phage vector to create a library of 30 million phage antibodies (Id.). From this single “naive” phage antibody library, binding antibody fragments have been isolated against more than 17 different antigens, including haptens, polysaccharides and proteins (Marks et al. (1991) J. Mol. Biol. 222: 581-597; Marks et al. (1993). Bio/Technology. 10: 779-783; Griffiths et al. (1993) EMBO J. 12: 725-734; Clackson et al. (1991) Nature. 352: 624-628). Antibodies have been produced against self proteins, including human thyroglobulin, immunoglobulin, tumor necrosis factor and CEA (Griffiths et al. (1993) EMBO J. 12: 725-734). It is also possible to isolate antibodies against cell surface antigens by selecting directly on intact cells. The antibody fragments are highly specific for the antigen used for selection and have affinities in the 1 :M to 100 nM range (Marks et al. (1991) J. Mol. Biol. 222: 581-597; Griffiths et al. (1993) EMBO J. 12: 725-734). Larger phage antibody libraries result in the isolation of more antibodies of higher binding affinity to a greater proportion of antigens.

[0234] It will also be recognized that antibodies can be prepared by any of a number of commercial services (e.g., Berkeley antibody laboratories, Bethyl Laboratories, Anawa, Eurogenetec, etc.).

[0235] C) Assay optimization

[0236] The assays of this invention have immediate utility in screening for agents that modulate the Socs2 expression and/or activity in a cell, tissue or organism. The assays of this invention can be optimized for use in particular contexts, depending, for example, on the source and/or nature of the biological sample and/or the particular test agents, and/or the analytic facilities available. Thus, for example, optimization can involve determining optimal conditions for binding assays, optimum sample processing conditions (e.g. preferred PCR conditions), hybridization conditions that maximize signal to noise, protocols that improve throughput, etc. In addition, assay formats can be selected and/or optimized according to the availability of equipment and/or reagents. Thus, for example, where commercial antibodies or ELISA kits are available it may be desired to assay protein concentration. Conversely, where it is desired to screen for modulators that alter transcription the Socs2 gene, nucleic acid based assays are preferred.

[0237] Routine selection and optimization of assay formats is well known to those of ordinary skill in the art.

[0238] D) Pre-screening for agents that bind Socs2 or Socs2 polypeptide

[0239] In certain embodiments, it is desired to pre-screen test agents for the ability to interact with (e.g. specifically bind to) a Socs2 (or mutant/allele) nucleic acid or polypeptide. Specifically, binding test agents are more likely to interact with and thereby modulate Socs2 expression and/or activity. Thus, in some preferred embodiments, the test agent(s) are pre-screened for binding to Socs2 nucleic acids or to Socs2 proteins before performing the more complex assays described above.

[0240] In one embodiment, such pre-screening is accomplished with simple binding assays. Means of assaying for specific binding or the binding affinity of a particular ligand for a nucleic acid or for a protein are well known to those of skill in the art. In preferred binding assays, the Socs2 protein or nucleic acid is immobilized and exposed to a test agent (which can be labeled), or alternatively, the test agent(s) are immobilized and exposed to an Socs2 protein or to a Socs2 nucleic acid (which can be labeled). The immobilized moiety is then washed to remove any unbound material and the bound test agent or bound Socs2 nucleic acid or protein is detected (e.g. by detection of a label attached to the bound molecule). The amount of immobilized label is proportional to the degree of binding between the Socs2 protein or nucleic acid and the test agent.

[0241] E) Scoring the assay(s)

[0242] The assays of this invention are scored according to standard methods well known to those of skill in the art. The assays of this invention are typically scored as positive where there is a difference between the activity seen with the test agent present or where the test agent has been previously applied, and the (usually negative) control, preferably where the difference is statistically significant (e.g. at greater than 80%, preferably greater than about 90%, more preferably greater than about 98%, and most preferably greater than about 99% confidence level). Most preferred “positive” assays show at least a 1.2 fold, preferably at least a 1.5 fold, more preferably at least a 2 fold, and most preferably at least a 4 fold or even a 10-fold difference from the negative control.

[0243] F) Agents for screening: Combinatorial libraries (e.g., small organic molecules)

[0244] Virtually any agent can be screened according to the methods of this invention. Such agents include, but are not limited to nucleic acids, proteins, sugars, polysaccharides, glycoproteins, lipids, and small organic molecules. The term “small organic molecules” typically refers to molecules of a size comparable to those organic molecules generally used in pharmaceuticals. The term excludes biological macromolecules (e.g., proteins, nucleic acids, etc.). Preferred small organic molecules range in size up to about 5000 Da, more preferably up to 2000 Da, and most preferably up to about 1000 Da.

[0245] Conventionally, new chemical entities with useful properties are generated by identifying a chemical compound (called a “lead compound”) with some desirable property or activity, creating variants of the lead compound, and evaluating the property and activity of those variant compounds. However, the current trend is to shorten the time scale for all aspects of drug discovery. Because of the ability to test large numbers quickly and efficiently, high throughput screening (HTS) methods are replacing conventional lead compound identification methods.

[0246] In one preferred embodiment, high throughput screening methods involve providing a library containing a large number of potential therapeutic compounds (candidate compounds). Such “combinatorial chemical libraries” are then screened in one or more assays, as described herein to identify those library members (particular chemical species or subclasses) that display a desired characteristic activity. The compounds thus identified can serve as conventional “lead compounds” or can, themselves, be used as potential or actual therapeutics.

[0247] A combinatorial chemical library is a collection of diverse chemical compounds generated by either chemical synthesis or biological synthesis by combining a number of chemical “building blocks” such as reagents. For example, a linear combinatorial chemical library such as a polypeptide (e.g., mutein) library is formed by combining a set of chemical building blocks called amino acids in every possible way for a given compound length (i.e., the number of amino acids in a polypeptide compound). Millions of chemical compounds can be synthesized through such combinatorial mixing of chemical building blocks. For example, one commentator has observed that the systematic, combinatorial mixing of 100 interchangeable chemical building blocks results in the theoretical synthesis of 100 million tetrameric compounds or 10 billion pentameric compounds (Gallop et al. (1994) 37(9): 1233-1250).

[0248] Preparation of combinatorial chemical libraries is well known to those of skill in the art. Such combinatorial chemical libraries include, but are not limited to, peptide libraries (see, e.g., U.S. Pat. No. 5,010,175, Furka (1991) Int. J Pept. Prot. Res., 37: 487-493, Houghton et al. (1991) Nature, 354: 84-88). Peptide synthesis is by no means the only approach envisioned and intended for use with the present invention. Other chemistries for generating chemical diversity libraries can also be used. Such chemistries include, but are not limited to: peptoids (PCT Publication No WO 91/19735, Dec. 26, 1991), encoded peptides (PCT Publication WO 93/20242, Oct. 14, 1993), random bio-oligomers (PCT Publication WO 92/00091, Jan. 9, 1992), benzodiazepines (U.S. Pat. No. 5,288,514), diversomers such as hydantoins, benzodiazepines and dipeptides (Hobbs et al., (1993) Proc. Nat. Acad. Sci. USA 90: 6909-6913), vinylogous polypeptides (Hagihara et al. (1992) J. Amer. Chem. Soc. 114: 6568), nonpeptidal peptidomimetics with a Beta-D-Glucose scaffolding (Hirschmann et al., (1992) J. Amer. Chem. Soc. 114: 9217-9218), analogous organic syntheses of small compound libraries (Chen et al. (1994) J. Amer. Chem. Soc. 116: 2661), oligocarbamates (Cho, et al., (1993) Science 261:1303), and/or peptidyl phosphonates (Campbell et al., (1994) J. Org. Chem. 59: 658). See, generally, Gordon et al., (1994) J. Med. Chem. 37:1385, nucleic acid libraries (see, e.g., Strategene, Corp.), peptide nucleic acid libraries (see, e.g., U.S. Pat. No. 5,539,083) antibody libraries (see, e.g., Vaughn et al. (1996) Nature Biotechnology, 14(3): 309-314), and PCT/US96/10287), carbohydrate libraries (see, e.g., Liang et al. (1996) Science, 274: 1520-1522, and U.S. Pat. No. 5,593,853), and small organic molecule libraries (see, e.g., benzodiazepines, Baum (1993) C&EN, January 18, page 33, isoprenoids U.S. Pat. No. 5,569,588, thiazolidinones and metathiazanones U.S. Pat. No. 5,549,974, pyrrolidines U.S. Pat. Nos. 5,525,735 and 5,519,134, morpholino compounds U.S. Pat. No. 5,506,337, benzodiazepines 5,288,514, and the like).

[0249] Devices for the preparation of combinatorial libraries are commercially available (see, e.g., 357 MPS, 390 MPS, Advanced Chem Tech, Louisville, Ky., Symphony, Rainin, Woburn, Mass., 433A Applied Biosystems, Foster City, Calif., 9050 Plus, Millipore, Bedford, Mass.).

[0250] A number of well known robotic systems have also been developed for solution phase chemistries. These systems include, but are not limited to, automated workstations like the automated synthesis apparatus developed by Takeda Chemical Industries, LTD. (Osaka, Japan) and many robotic systems utilizing robotic arms (Zymate II, Zymark Corporation, Hopkinton, Mass.; Orca, Hewlett-Packard, Palo Alto, Calif.) which mimic the manual synthetic operations performed by a chemist and the Venture™ platform, an ultra-high-throughput synthesizer that can run between 576 and 9,600 simultaneous reactions from start to finish (see Advanced ChemTech, Inc. Louisville, Ky.)). Any of the above devices are suitable for use with the present invention. The nature and implementation of modifications to these devices (if any) so that they can operate as discussed herein will be apparent to persons skilled in the relevant art. In addition, numerous combinatorial libraries are themselves commercially available (see, e.g., ComGenex, Princeton, N.J., Asinex, Moscow, Ru, Tripos, Inc., St. Louis, Mo., ChemStar, Ltd, Moscow, RU, 3D Pharmaceuticals, Exton, Pa., Martek Biosciences, Columbia, Md., etc.).

[0251] G) High Throughput Screening

[0252] Any of the assays for compounds modulating the accumulation or degradation of metabolic products described herein are amenable to high throughput screening. Preferred assays detect increases or decreases in Socs2 transcription and/or translation in response to the presence of a test compound.

[0253] The cells utilized in the methods of this invention need not be contacted with a single test agent at a time. To the contrary, to facilitate high-throughput screening, a single cell may be contacted by at least two, preferably by at least 5, more preferably by at least 10, and most preferably by at least 20 test compounds. If the cell scores positive, it can be subsequently tested with a subset of the test agents until the agents having the activity are identified.

[0254] High throughput assays for various reporter gene products are well known to those of skill in the art. For example, multi-well fluorimeters are commercially available (e.g., from Perkin-Elmer).

[0255] In addition, high throughput screening systems are commercially available (see, e.g., Zymark Corp., Hopkinton, Mass.; Air Technical Industries, Mentor, Ohio; Beckman Instruments, Inc. Fullerton, Calif.; Precision Systems, Inc., Natick, Mass., etc.). These systems typically automate entire procedures including all sample and reagent pipetting, liquid dispensing, timed incubations, and final readings of the microplate in detector(s) appropriate for the assay. These configurable systems provide high throughput and rapid start up as well as a high degree of flexibility and customization. The manufacturers of such systems provide detailed protocols the various high throughput. Thus, for example, Zymark Corp. provides technical bulletins describing screening systems for detecting the modulation of gene transcription, ligand binding, and the like.

[0256] H) Modulator databases

[0257] In certain embodiments, the agents that score positively in the assays described herein (e.g. show an ability to modulate Socs2 expression) can be entered into a database of putative and/or actual modulators of Socs2 expression. The term database refers to a means for recording and retrieving information. In preferred embodiments, the database also provides means for sorting and/or searching the stored information. The database can comprise any convenient media including, but not limited to, paper systems, card systems, mechanical systems, electronic systems, optical systems, magnetic systems or combinations thereof. Preferred databases include electronic (e.g. computer-based) databases. Computer systems for use in storage and manipulation of databases are well known to those of skill in the art and include, but are not limited to “personal computer systems”, mainframe systems, distributed nodes on an inter- or intra-net, data or databases stored in specialized hardware (e.g. in microchips), and the like.

[0258] III. Pre-screening for agents that bind Socs2 or Socs2 polypeptide

[0259] In certain embodiments it is desired to pre-screen test agents for the ability to interact with (e.g. specifically bind to) a hg gene (or mutant/allele) nucleic acid or polypeptide. Specifically, binding test agents are more likely to interact with and thereby modulate Socs2 expression and/or activity. Thus, in some preferred embodiments, the test agent(s) are pre-screened for binding to Socs2 nucleic acids or to Socs2 proteins before performing the more complex assays described above.

[0260] In one embodiment, such pre-screening is accomplished with simple binding assays. Means of assaying for specific binding or the binding affinity of a particular ligand for a nucleic acid or for a protein are well known to those of skill in the art. In preferred binding assays, the Socs2 protein or nucleic acid is immobilized and exposed to a test agent (which can be labeled), or alternatively, the test agent(s) are immobilized and exposed to an Socs2 protein or to a Socs2 nucleic acid (which can be labeled). The immobilized moiety is then washed to remove any unbound material and the bound test agent or bound Socs2 nucleic acid or protein is detected (e.g. by detection of a label attached to the bound molecule). The amount of immobilized label is proportional to the degree of binding between the Socs2 protein or nucleic acid and the test agent.

[0261] IV. Screening for hg phenotype or for a predilection thereto

[0262] In still another embodiment, this invention contemplates screening an organism for the presence of an hg phenotype (e.g. a Socs2 knockout or Socs2 dysregulation). In preferred embodiments, such methods involve either detecting a Socs2^{hg} mutation or other “downregulated” Socs2 allele or mutant or modified nucleic acid or a protein product of such a nucleic acid. Nucleic acids and/or proteins can be detected by a wide variety of methods well known to those of skill in the art, e.g as described above.

[0263] Thus, an aspect of this invention is to use oligonucleotide probes to detect DNA sequences complementary to the probes e.g. in a mixture of DNA sequences (genomic DNA, mRNA, etc.). Or to select oligonucleotide primers for amplifying such nucleic acid sequences. Certain Preferred primers comprise at least 10, preferably at least 15, more preferably at least 20, and most preferably at least 25, or at least 30 contiguous nucleotides, e.g., from SEQ ID NOS:1, 3, 9, etc or their complementary sequences.. For example, among the PCR primers that are markers of the hg region and that have been used to amplify the STSs shown in the physical map of FIG. 1 are the following single stranded oligonucleotide sequences:

[0264] TGGAAGCCAGAGACAAGCAG SEQ ID NO:5

[0265] AGAAATGGAAGCCAGAGACAA SEQ ID NO:6

[0266] CTTTTGACACCTTCCTCGATTC SEQ ID NO:7

[0267] CTCAAACCACAGGCCTCCGGA SEQ ID NO:8

[0268] V. Hg nucleic acids and vectors

[0269] In certain embodiments, practice of this invention includes the use of a nucleic acid construct comprising a sequence coding for hg. In certain embodiments, the hg nucleic acid construct is present in an expression cassette. A “recombinant expression cassette” or simply an “expression cassette” is a nucleic acid construct, generated recombinantly or synthetically, with nucleic acid elements that are capable of effecting expression of a gene or cDNA in hosts compatible with such sequences. Expression cassettes typically include at least promoters and optionally, transcription termination signals. Typically, the recombinant expression cassette includes a nucleic acid to be transcribed (e.g., a nucleic acid encoding a desired polypeptide), and a promoter. Additional factors necessary or helpful in effecting expression may also be used as described herein. For example, an expression cassette can also include nucleotide sequences that encode a signal sequence that directs secretion of an expressed protein from the host cell a selectable marker, and the like.

[0270] The expression cassette is, optionally, placed in a vector (e.g., a bacteria, insect, or viral vector for transfecting one or more cells. Expression and cloning vectors preferably contain a nucleotide sequence that enables the vector to replicate in one or more selected host cells. Generally, in cloning vectors this sequence is one that enables the vector to replicate independently of the host chromosomes, and includes origins of replication or autonomously replicating sequences.

[0271] Methods of expressing heterologous proteins are well known to those of skill in the art and using, the information provided herein one of skill in the art can routinely prepare appropriate expression cassettes, vectors, transformed cells, and the like. Examples of these techniques and instructions sufficient to direct persons of skill through many cloning exercises are found in Berger and Kimmel, Guide to Molecular Cloning Techniques, Methods in Enzymology 152 Academic Press, Inc., San Diego, Calif. (Berger); Sambrook et al. (1989) Molecular Cloning—A Laboratory Manual (2nd ed.) Vol. 1-3, Cold Spring Harbor Laboratory, Cold Spring Harbor Press, NY, (Sambrook et al.); Current Protocols in Molecular Biology, F. M. Ausubel et al., eds., Current Protocols, a joint venture between Greene Publishing Associates, Inc. and John Wiley & Sons, Inc., (1994 Supplement) (Ausubel); Cashion et al., U.S. Pat. No. 5,017,478; and Carr, European Patent No. 0,246,864. Examples of techniques sufficient to direct persons of skill through in vitro amplification methods are found in Berger, Sambrook, and Ausubel, as well as Mullis et al., (1987) U.S. Pat. No. 4,683,202; PCR Protocols A Guide to Methods and Applications (Innis et al. eds) Academic Press Inc. San Diego, Calif. (1990) (Innis); Ainheim & Levinson (Oct. 1, 1990) C&EN 36-47; The Journal Of NIH Research (1991) 3: 81-94; (Kwoh et al. (1989) Proc. Natl. Acad. Sci. USA 86: 1173; Guatelli et al. (1990) Proc. Natl. Acad Sci. USA 87, 1874; Lomell et al. (1989) J. Clin. Chem., 35: 1826; Landegren et al., (1988) Science, 241: 1077-1080; Van Brunt (1990) Biotechnology, 8: 291-294; Wu and Wallace, (1989) Gene, 4: 560; and Barringer et al. (1990) Gene, 89: 117.

[0272] VI. Kits

[0273] In still another embodiment, this invention provides kits for creation of animals comprising an inhibited or knocked-out Socs2 gene and/or for screening for Socs2 expression. Kits for the preparation of knockout animals preferably include a nucleic acid that, upon undergoing homologous recombination with a Socs2 gene or Socs2 control element inhibits or eliminates transcription and/or translation of a Socs2 gene product. Such kits, optionally, include reagents for delivery of such nucleic acids and appropriate instructional materials.

[0274] Other kits comprises cells (e.g. stem cells), cell lines, embryos, or animals comprising a cell encoding a Socs2 allele or alleles that results in reduced or eliminated expression of Socs2. Where the kits comprise animals, the animals are heterozygous or homozygous for the “mutant” socs2 allele(s). The “mutation” can exist in somatic an/or reproductive cells and, in certain embodiments, the animal is chimeric for the “mutation.”

[0275] In still other embodiments, this invention provides kits for performing one or more of the assays described herein. Preferred kits comprise one or more nucleic acid probes specific to Socs2 or to a mutant thereof and/or one or more antibodies specific to a Socs2 polypeptide. Also, optionally included, are buffers, equipment (e.g. microtiter plates) and the like to facilitate practice of the assays described herein.

[0276] As indicated above, the kits may include instructional materials containing directions (i.e., protocols) for the preparation of Socs2 knockouts, and/or for the practice of the assay methods of this invention. While the instructional materials typically comprise written or printed materials they are not limited to such. Any medium capable of storing such instructions and communicating them to an end user is contemplated by this invention. Such media include, but are not limited to electronic storage media (e.g., magnetic discs, tapes, cartridges, chips), optical media (e.g., CD ROM), and the like. Such media may include addresses to internet sites that provide such instructional materials.

### EXAMPLES

[0277] The following examples are offered to illustrate, but not to limit the claimed invention.

### Example 1

[0278] SEQ ID NO:1 illustrates a mouse cDNA, which is a gene in the high growth (“hg”) region. The hg region appears to be highly conserved, as will be more fully described herein.

[0279] Turning to FIG. 1, the deleted microsatellite marker, D10Mit69, was utilized as an entry point to physical cloning of the hg-containing segment using Yeast Artificial Chromosome (YAC) and Bacterial Artificial Chromosome (BAC) cloning systems. The size of the deletion in high growth mice, estimated from the clone lengths, is on the order of a half million base pairs.

[0280] The open reading frame of the mouse B308A-6-1 (FIG. 3A) is predicted to encode 199 amino acids (FIG. 3B) which share very high homology (178/199 identical amino acids) with the human protein, corresponding to the RAIDD/CRADD gene. The nucleotide sequence of the original exon-trap clone, with the position of primers 1, 2, 3, and 4 is indicated by FIG. 4 (this partial sequence is SEQ ID NO:2). The bovine sequence, which is yet a partial coding sequence, is SEQ ID NO:3 and is shown by FIG. 5. This PCR amplified sequence was from reverse transcribed lactating mammary gland mRNA using the mouse primers 2 and 3 (the primers indicated by FIG. 4).

[0281] There is high homology observed between the mouse and bovine sequences (49/52 identical amino acids). The homology between the mouse protein discussed here and the human RAIDD proteins reported by another group (Duan and Dixit (1997) Nature 385:86-89) is very conserved when compared in the conserved, NH2 and C terminal domains. In the NH₂-terminal domain (amino acids 1-80), 79 out of 80 residues are identical, whereas in the C-terminal “death domain” (amino acids 123-199), 77 out of 86 amino acids are identical. Therefore PCR primers in these domains should be very useful to pick up the homologous DNA segments in other species. The bovine B308A segment, SEQ ID NO:3, was obtained using mouse primers on the NH₂-terminal domain.

[0282] Without being bound by theory, we suggest that high growth mice are bigger because they have more cells that are moderately larger. The control of cell number depends primarily on the balance between processes of proliferation and cell death (apoptosis) (Jacobson et al. (1997) Cell, 88: 347-354, 1997; Raff (1996) Cell, 86:173-175). In mammals, apoptosis begins at blastula stage and continues throughout life and can be of equal importance in controlling cell numbers as cell proliferation (Raff, supra). There are nematode mutations that abolish apoptosis and result in a worm with a 15% increase in cell numbers, a normal lifespan, morphology and behavior (Ellis and Horvitz (1986) Cell, 44: 817-829). It might be possible therefore that the high growth phenotype as a result of an increase in cell numbers might be due to in part to a perturbed apoptosis program caused by a lack of function of a apoptotic protein such as that corresponding to our clone B308A-6-1, which is homologous to human RAIDD (Duan and Dixit, supra).

[0283] Returning to FIG. 1, we have cloned a high growth (“hg”) region in bacterial artificial chromosomes (“BAC”) and yeast artificial chromosomes (“YAC”). Marker D10Mit69 was used to initiate the bi-directional chromosomal walk. A BAC library (Research Genetics, Huntsville, Ala., USA) was screened as follows: so-called higher-order pools containing DNAs from several 384 clone plates were screened by polymerase chain reaction (PCR) to identify a positive 384 well plate. Clones from this plate were then grown on membranes, colony-lysed (Nizetic et al. (1991) Proc. Natl. Acad. Sci., USA, 88(8):3233-3237, 1991) and hybridized to a relevant probe. If a probe was a microsatellite marker (such as D10Mit69) or contained other types of repetitive DNA, an oligonucleotide probe was designed in the unique parts of the marker to prevent cross hybridization to clones containing these repeats. Identified single positive BAC clones were sized on a pulsed-field gel apparatus (CHEF-DRIII, Bio-Rad) and sequenced from the ends of the insert (Wang et al. (1994) Genomics, 24:527-534). These sequences were utilized to construct a PCR primer pair at each end (so-called sequence tagged sites, “STS,” which were in turn used to screen the BAC library again to isolate the next overlapping clone(s). Each end STS was examined for amplification in hg mouse and its parental strains to test whether a deletion breakpoint had been crossed. The cloning of the hg region in BAC clones was complete once clones that span the whole deletion and both deletion endpoints were obtained. A map of YAC and BAC clones in the hg region is illustrated by FIG. 1.

[0284] BAC clones B308D2 and B11I10 (FIG. 1) were subcloned in vector pSPL3 (GibcoBRL, New York, USA) which flanks an insert with splice donor and splice acceptor sites. These pSPL3 subclones of BACs were transfected into COS7 cells (African-green monkey cells obtained from American type culture Collection, Maryland, USA) using electroporation following manufacturer's protocols (BioPulser, Bio-Rad, California, USA). RNA was isolated from cell cultures 24 hours following the transfection using Trizol reagent (Gibco-BRL). Reverse transcription and PCR amplification were as described in Church et al. (1994) Nat. Genet., 6: 98: 105. Each exon trapping product was then cloned (TA cloning kit, Invitrogen, USA) and used as a probe in hybridizations to blots of BAC digests to verify whether the exon trapping product was derived from a particular BAC(s). Candidate exon trapping products were then sequenced.

[0285] The sequence of end STSs and candidate exon trapping products were compared to all sequences in public sequence data banks with BLAST and FASTA computer programs to test for similarity to known genes or expressed sequence tags (ESTs). Candidate exons were then screened for the presence of corresponding RNA from a variety of tissues and developmental stages using Northern blots. The sequence of the candidate exon trapping product B308A was found to be highly homologous to an EST derived from the mouse embryo (93% identity) and several human ESTs (83-87% identity) derived from fetal liver/spleen and infant brain, and to the human death adaptor molecule (86% similarity), RAIDD (GenBank Accession No. 079115) (Duan and Dixit, supra) or CRADD (GenBank Accession No. 084388) (Ahmad et al. (1997) Cancer Research, 57: 615-617). The Northern analysis showed that the RNA containing exon trapping B308A sequence is widely expressed in several tissues and developmental stages, most notably in liver (FIG. 2).

[0286] Using the candidate exon B308A as a probe, a mouse mammary (15-day gestation) cDNA library (C. Watson, Roslin Institute, personal communication) was screened using standard procedures for lambda phage cDNA library screens (Maniatis et al. (1992) Molecular Cloning: A Laboratory Manual, Cold Spring Harbor Lab., Cold Spring Harbor, New York). A total of 11 lambda phage cDNA clones were isolated—one clone of ˜1.6 Kb and 10 clones of ˜1 Kb. The ˜1.6 Kb clone (clone B308A-6-1, FIG. 3) was then thoroughly sequenced using primer walking method. B308A-6-1 was also mapped back to the hg deletion (FIG. 1). The cDNA containing B308A-6-1, SEQ ID NO:1, represents the first candidate gene in the hg region..

[0287] Using mouse PCR primers we have amplified and sequenced a fragment corresponding to the NH₂-terminal domain of B308A-6-1 in reverse transcribed RNA from cow lactating mammary gland (FIG. 5). A comparison between the predicted amino acid sequences of mouse, bovine, and human proteins shows that the sequence of B308A-6-1 is highly conserved between mouse, human, and cattle. This lends experimental support to the conservation of this region in other animals and suggests hg will most likely be found in the genome of other domestic animals, including poultry.

[0288] The mouse cDNA, SEQ ID NO:1, is used isolate a cosmid containing chicken hg.. The hg homolog was checked by DNA sequencing and the gene mapped by fluorescent in-situ hybridization (“FISH”) onto chicken metaphase spreads to chicken chromosome 1 (Smith et al. Mamm Genome 11:706-709, 2000). Markers were developed based on the chicken genomic sequence and mapped onto a reference genetic linkage map of chicken (the map being available at the Web site http://www.ri.bbsrc.ac.uk/). Interestingly Raidd/Cradd maps to the approximate location of a growth QTL in broiler chickens (Groenen et al. (1997) Anim. Biotechnology 8:41-46). The hg marker can be used to genotype F₂ progeny of the cross to confirm linkage to the growth QTL.

[0289] Since in mammals there is a gene about every 50 kb and a deletion in high growth mice is about 500 Kb, further transcript mapping may identify additional genes in the hg region (see, e.g., SEQ ID NO: 20). The deletion in the hg region suggests that high growth effect is due to a lack-of-function of hg. Therefore any gene that maps to the deletion may contribute to the hg phenotype. A transgenic analysis for gene identification is conducted as shown in FIGS. 6 and 7.

[0290] It is feasible to identify cognate genes by in vivo complementation. The addition of wild type copies of the hg gene onto a high growth mutant background is expected to eliminate the high growth effect. High growth mice transgenic for hg are expected to grow more slowly than non-transgenic high growth mice. For this purpose, transgenic mice containing candidate DNA constructs or candidate large insert clones such as YACs and BACs are constructed. Transgenic lines carrying these constructs are then be tested for their ability to complement the hg mutation in breeding studies. We have created 2 transgenic lines containing BAC clones B11I10 and 520L19 (contains the Socs2 gene) that are being used to study the effects of in-vivo complementation of homozygous hg/hg mice, and to study the effects of overexpression of genes like Socs2 on wild type +/+ mice.

### Example 2

### Lack of Socs2 Expression Causes the High-Growth Phenotype in Mice

[0291] Characterizing causal molecular defects in mouse models of overgrowth or dwarfism helps to identify the key genes and pathways that regulate the growth process. We report here the molecular basis for high growth (hg), a spontaneous mutation that causes a 30-50% increase in postnatal growth. We conclude that hg is an allele of the suppressor of cytokine signaling 2 (Socs2), a member of a family of regulators of cytokine signal transduction. We demonstrate mapping of Socs2 to the hg region, lack of Socs2 mRNA expressin, a disruption of the Socs2 locus in high growth (HG) mice and a similarity of phenotypes of HG mice and Socs2^{-/-} mice generated by gene targeting. Charactersitics of the HG phenotype suggest that Socs2 deficiency affects growth prenatally and postnatally, most likely through deregulating the growth hormone (GH)/insulin-like growth factor I (IGF1). These results demonstrate a critical role for Socs2 in controlling growth.

[0292] The study of mammalian growth-control genes is essential for elucidating the mechanism of growth at the tissue, organ or whole-body level. The high growth (hg) mutation is a unique overgrowth model in that it causes a 30-50% increase in postweaning growth without resulting in obesity (Bradford and Famula (1984) Genet. Res. 44: 293-308). High growth (HG) mice have increased plasma IGF1 (Corva and Medrano (2000) Physiol. Genomics 3: 17-23; Medrano et al. (1991) Genet. Res. 58: 67-74) and decreased plasma and pituitary GH (Medrano et al. (1991) Genet. Res. 58: 67-74) suggesting that the causal mutation influences growth through deregulating the GH/IGF1 system. We have shown (Horvat and Medrano (1995) Genetics 139: 1737-1748) that hg is not an allele of Gh or Igfl and that it is located within a 500-kb deletion in mouse chromosome 10 (Horvat and Medrano (1998) Genomics 54: 159-164). Here we used comparative mapping to identify positional candidates for hg. The mouse hg region was previously mapped (Horvat and Medrano (1998) Genomics 54: 159-164) to a genetic interval of 100 to 103 cM from the top of human chromosome 12. Human expressed sequence (EST) clones from this region were selected from the human gene map (http://www.ncbi.nlm.nih.gov/) and used as probes on blots containing mouse BAC clones from the hg region. Southern analysis was performed using standard procedures (Sambrook et al.(1989) Molecular cloning: a laboratory manual. 2nd ed., Cold Spring Harbor Laboratory Press, Cold Spring Harbor, NY.) under the lower stringency hybridization temperature (55° C.).

[0293] One human EST clone (IMAGE ID 133063) representing a cDNA for the human suppressor of cytokine signaling (SOCS2) cross-hybridized to BAC 520L19 that was previously mapped at the deletion endpoint in the hg region (Horvat and Medrano (1998) Genomics 54: 159-164). Comparative sequence analyses established that mouse, human and rat SOCS2 cDNAs (Unigene clusters Mm 4132, Mm. 30754, Hs. 110776 and Rn. 15045) are homologous to a sequence from the BAC 520L19 (FIG. 2a). SOCS2 protein, also known as cytokine-inducible SH2-containing protein 2 (CISH2), belongs to a family of cytokine-inducible inhibitors that regulate cytokine signal transduction (Starr et al. (1997) Nature 387: 917-921). SOCS2 is involved in GH signaling (Favre et al. (1999) FEBS Letters 453: 63-66) and was shown to interact with the IGF1 receptor (Dey et al. (1998) J. Biol Chem. 273: 24095-24101) linking SOCS2 to two key molecules in mammalian growth control. Therefore, mapping of Socs2 to the hg region and its potential function in growth control via GH/IGFI made Socs2 an excellent candidate for hg.

[0294] We examined whether Socs2 expression is affected in the HG model and found a lack of Socs2 mRNA in HG mice (FIG. 8). To identify an underlying cause for this, we searched for genomic alterations at the Socs2 locus in HG mice. Southern, polymerase chain reaction (PCR) and sequence analyses demonstrated a deletion breakpoint in HG mice in intron 2 of Socs2 (FIG. 9), which results in the complete loss of exon 3 and sequences downstream. We note that the phenotype of Socs2-deficient mice (Socs2^{-/-}) generated by gene targeting (Metcalf et al. (2000) Nature 405: 1069-1073) is essentially identical to the phenotype of HG mice. Similar to Socs2^{-/-} mice, the postweaning growth of HG mice is increased by 30-50% (Bradford and Famula (1984) Genet. Res. 44: 293-308), collagen content in skin is increased (Reiser et al. (1996) Am. J Physiol. 271: 8696-703), organ and skeletal growth are increased (Famula et al. (1988) Growth. Dev. & Aging 52: 145-150), the increase in muscle mass is accompanied by muscle fiber hyperplasia (Summers and Medrano (1994) Growth Dev. Aging 58: 135-148, Summers and Medrano (1997) Proc. Soc. Exp. Biol. Med. 214: 380-385) and GH secretion and IGF1 secretion are deregulated (Corva and Medrano (2000) Physiol. Genomics 3: 17-23; Medrano et al. (1991) Genet. Res. 58: 67-74). On the basis of mapping of Socs2 to the hg region, the similarity of phenotypes between Socs2^{-/-} and HG mice, and the lack of Socs2 expression and disruption of the Socs2 locus in HG mice described above, we conclude that hg is an allele of Socs2 (Socs2^{hg}) and that the lack of Socs2 expression is responsible for the high growth phenotype.

[0295] A potential dissimilarity between the Socs2^{-/-} mice and HG mice is in serum IGF1 levels. No differences were reported between Socs2^{-/-} and control mice (Metcalf et al. (2000) Nature 405: 1069-1073) whereas we have demonstrated elevated serum IGF1 levels in HG mice (Corva and Medrano (2000) Physiol. Genomics 3: 17-23; Medrano et al. (1991) Genet. Res. 58: 67-74). In Socs2^{-/-} mice, it was suggested that Socs2-deficiency leads to increased local production of IGF1, which is then responsible for the increased growth phenotype (Metcalf et al. (2000) Nature 405: 1069-1073). Despite the recent evidence that paracrine/autocrine action of IGF1 is of paramount importance in regulating postnatal growth (Sjogren et al. (1999) Proc. Natl. Acad. Sci, USA, 96: 7088-7092; Yakar et al. (1999) Proc. Natl. Acad. Sci., USA, 96: 7324-7329), the fact that we find increased serum levels of IGF1 in HG mice can not rule out at least some endocrine role of IGF1 in generating the increased growth phenotype. Given that the genetic background (strain C57BL/6J) is the same in both Socs2^{-/-} and HG mice, it is possible that the discrepancy is due to differences in the age of mice when IGF1 serum levels were determined or husbandry procedures. Another possible explanation could be that the increased IGF1 serum level in HG mice is not due to Socs2 deficiency but due to another effect of the hg region (e.g., deletion of another gene within the 500 kb deletion).

[0296] We also show that the Socs2 mRNA is expressed during embryogenesis in wild type mice (FIG. 8) suggesting its role in prenatal growth. It is possible that Socs2 deficiency has an effect during fetal growth, weeks before the effect on body weight is observed and before the major GH/IGF1 effect on postnatal growth (about 3-4 weeks of age) starts. Evidence that embryogenesis is affected in the HG mouse is in the fetal muscle, where delayed myogenesis and muscle fiber hyperplasia were observed (Summers and Medrano (1997) Proc. Soc. Exp. Biol. Med. 214: 380-385). Muscle fiber hyperplasia has also been suggested to occur in Socs2^{-/-} mice (Metcalf et al. (2000) Nature 405: 1069-1073). Therefore, Socs2 deficiency has an effect on fetal muscle development resulting in more muscle cells and might have a similar effect in other fetal tissues. The prenatal effect of Socs2 deficiency could be mediated via GH and IGF1, which have been implicated in fetal growth and development (Shoba et al. (1999) Mol. Cell. Endo. 152: 125-136). Therefore, the observed effect on postnatal growth may not entirely be due to the postnatal effect of Socs2 deficiency but also due to the prenatal effect of Socs2 deficiency mediated through changes of developmental program of some fetal tissues.

[0297] Increased growth in HG mice and identified genomic and expression alterations of Socs2 confirm the key role for this gene in growth control. The phenotypes of Socs2^{-/-} mice and HG mice are very similar in several characteristics (see above), but a question still remains whether the HG mice have some additional phenotypes caused by the 500 kb deletion. Further comparisons of growth and other traits between the Socs2^{-/-} mice, HG mice and knockouts of other genes from the hg region (e.g., Raidd/Cradd) should help to clarify if there are any other phenotypes particular to the HG mice that are not due to Socs2 deficiency alone.

[0298] For a growth-control gene with an inhibitory function like Socs2, it is expected that the lack of expression has a growth promoting effect, and overexpression has a growthinhibiting effect (Efstratiadis (1998) Int. J Dev. Biol. 42: 955-976). Therefore, manipulation of SOCS2 protein expression should be useful in animals as a strategy for improving animal growth and in human medicine for treating growth disorders.

### Example 3

### Quantitative Trait Loci Affecting Growth in High Growth (hg) Mice

[0299] This example describes a genome-wide scan performed in order to identify Quantitative Trait Loci (QTL) associated with growth in a population segregating high growth (hg), a partially recessive mutation that enhances growth rate and body size in the mouse. A sample of 262 hg/hg mice was selected from a C57BL/6J-hg/hg×CAST/EiJF₂ cross and typed with 79 SSLP markers distributed across the genome. Eight significant loci were identified through interval mapping. Loci on chromosomes 2 and 8 affected the growth rate of F2 mice. Loci on chromosomes 2 and 11 affected growth rate ad carcass lean mass(protein and ash). A locus on chromosome 9 modified femur length and another one in chromosome 17 affected both carcass lean mass and femur length, but none of these had significant effects on growth rate. Loci on chrosomes 5 and 9 modified carcass fat content. Additive effects were positive for C57BL/6J alleles except for the two loci affecting carcass fatness. Typing of selected markers in 274 +/+ F2 mice revealed significant interactions between hg and other QTL, which were detected as changes in gene action (additive or dominant) and in allele substitution effects. Knowledge about interactions between loci, especially when major genes are involved, helps in the identification of positive candidate genes and in understanding of the complex genetic regulation of growth rate and body size in mammals.

### Introduction

[0300] The high growth locus (hg) is an autosomal, partially recessive mutation that enhances weight gain and body size by 30-50% in the mouse (Bradford and Famula (1984) Genet. Res. 44: 293-308). Despite the drastic change in growth rate, hg/hg mice are proportionate in the size of tissues and organs (Famula et al. (1988) Growth Dev. Aging 52: 145-150). This unique phenotype distinguishes hg from other known spontaneous mutations that affect body weight by causing either obesity (LEP^{ob}, Lepr^{db}, Cpe^{fat}, A^{y}, tub) or dwarfism (Pitl^{dw}, Propl^{df}, Ghrhr^{lit}, Hmgic^{pg}, mn, dm) (Lyon et al. (1996) Genetic Variants and Strains of the Laboratory Mouse. Oxford University Press, Oxford; New York). Genetic and physical mapping have determined that a deletion in chromosome 10 causes the High Growth (HG) phenotype (see discussion herein and Horvat and Medrano (1996) Genomics 36: 546-549; Horvat and Medrano (1998) Genomics 54: 159-164). It was a discovery of the present invention that the hg phenotype results from a lack of expression of the suppressor of cytokine signaling 2 (Socs2 or Cish2).

[0301] A spontaneous mutation enhancing growth rate and body size is a valuable model for studying the genetics of growth in mammals. Changes in body size are usually achieved through an altered pattern of cell proliferation (Raff (1996) Cell 86: 173-175). It has been demonstrated that, at least in the muscle, hg mice have a larger number of fibers due to enhanced cell proliferation and delayed fusion of myoblasts (Summers and Medrano (1994) Growth Dev. Aging 58: 135-148; Summers and Medrano (1997) Proc. Soc. Exp. Biol. Med. 214: 380-385). However, there is no evidence of any abnormalities in tissue development as it is observed in other mouse models of enhanced growth, such as the p27^{Kipl} gene knockout (Nakayama et al. (1996) Cell 85: 707-720).

[0302] One of the potential limitations to the extension to other species of discoveries from major gene mutations in the mouse is the confounding effect of other genetic and non-genetic factors on the phenotype under study, and hg is not an excepton to that limitation. We have demonstrated that the nutritional environment has a profoud effect on the hg phenotype (Corva and Medrano (2000) Genomics 3: 17-23). Also, other lines of evidence suggest that the genetic background could modulate the effects of hg on growth. The hg locus was found in a strain of mice selected for high 3- to 6-week weight gain (Bradford and Famula (1984) Genet. Res. 44: 293-308). In that genetic background, weight gain data followed a bimodal distribution and it was possible to identify most hg/hg mice based on their phenotype. A C57BL/6J-hg/hg×CAST/EiJ F₂ cross (Horvat and Medrano (1995) Genetics 139: 1737-1748, and examples herein) was used to map hg to chromosome 10, and in this population, weight gain data followed a normal distribution and it was no longer possible to identify hg/hg individuals without knowledge of their genotypes. This information, together with the fact that hg was discovered in aline selected for high weight gain, led us to hypothesize that expressivity of hg was modulated by other genes associated with growth regulation.

[0303] In this example, we present the results of a genomo-wide scan on the hg/hg individuals of a C57BL/6J-hg/hg×CAST/EiJ F₂ cross to identify QTL (Quatitative Trait Loci) affecting growth rate, body size, and carcass composition. After identifying QTL in the hg/hg individuals we examined the effect of these QTL also in +/+ F₂ mice, for identifying genetic modifier loci of hg. We considered as unique modifiers of hg all the QTL that were detected in the hg/hg background, but not in the +/+ background and those that had effects in both backgrounds, but displayed significant differences in gene action.

### Materials and Methods

### Mouse Crosses

[0304] The hg locus has been introgressed into the C57BL/6J (C57) background by nine backcrosses to create the congenic line C57BL/6J-hg/hg (HG). In this experiment, congenic mice from the seventh generation of inbreeding were used. CAST/EiJ (CAST) males were mated to hg females to create the mapping cross (examples herein and Horvat and Medrano (1995) Genetics 139: 1737-1748). CAST mice are smaller and much leaner than C57 mice, even when the mice are on a high fat diet (York et al. (1996) Mamm. Genome 7: 677-681). Therefore, the cross is suitable to detect specific alleles interacting with hg that modify body size and composition.

[0305] A total of 75 F₁ and 1,132 F₂ mice were produced. The F₂ cross was genotyped for hg using the linked marker D10Mit41 and a marker that maps to the hg deletion, D10Mit69 (examples herein and Horvat and Medrano (1996) Genomics 36: 546-549). Mice homozygous for hg alleles at D10Mit41 and without a PCR amplification product for D10Mit69 (indicating homozygosity for the hg deletion) were considered to be of hg/hg genotype and mice homozygous for CAST alleles at D10Mit41 and amplifying for D10Mit69 were regarded as being of +/+ genotype. Using such a screen, we determined that the cross was composed of 274 +/+ mice, 596 +/hg mice and 262 hg/hg mice, which is in agreement with Mendelian segregation ratios in the F₂ population.

[0306] A second experimental cross was created by mating C57 and CAST mice. Sixty F₁, mice and 330 F₂ mice were produced. This F₂ cross was used to confirm the significance of linkage of markers identified on chromosome 2 of the F₂ cross segregating hg, by means of selective genotyping.

### Husbandry and Phenotype Determinations

[0307] Mice were weaned at 3 weeks of age. Feed (Purina 5008; 23.5% protein, 6.5% fat, 3.3 Kcal/g) and water were offered ad libitum. Mice were weighed to the nearest 0.1 g at 2, 3, 6 and 9 weeks of age and sacrificed after 9 weeks of age by cervical dislocation. Liver, spleen, and skin were removed and the carcass was frozen. To perform the chemical analysis, carcasses were thawed at room temperature. Carcass water content was determined by freeze-drying the carcasses to a constant weight. Lipid content was estimated by the carcass weight change after extraction with ether for seven days followed by acetone for five days in a Soxhlet apparatus. Body ash content was determined by incinerating the carcass in a muffle furnace at 575° C. for 16 hours. One femur bone was removed from the partially ashed carcass and measured to 0.1 mm. Only live weights at the same ages mentioned above were recorded in the C57×CAST cross.

[0308] We measured protein mass because the dry matter is considered a better estimator of dynamics of cell populations of an organ or body than their fresh weight (Graham et al. (1998) Genet. Res. 72: 247-253). We also included ash mass and femur length to have an estimation of differences in skeletal mass and size, respectively. Although we did not measure body length of the F₂ mice, Famula et al. (1988) Growth Dev. Aging 52: 145-150, demonstrated that femur length is a good predictor of body length (regression R²=0.83; uniform regression slopes between hg/hg and control mice).

### Genotyping and Linkage Analysis

[0309] In order to find QTL we followed a hierarchical search approach (Brown et al. (1994) Am. J Hum. Genet. 54: 544-552). In the first step, the hg/hg mice from the F₂ cross were genotyped with a set of 59 SSLP markers (Research Genetics, Huntsville, Ala.) covering the 19 autosomal chromosomes and chromosome X (FIG. 10). Some of these markers were chosen based on their proximity to known genes and previously identified growth QTL. The typing of markers was performed following conventional PCR and agarose gel electrophoresis methods. The linkage of these markers to loci affecting weight gain and body composition was evaluated through ANOVA, using the GLM procedure of SAS (SAS 1998). The model included marker genotype information and the fixed effects of sex, parity, litter size, and two-way interactions. The analyzed traits were body weight at 2, 3, 6 and 9 weeks of age, weight gain from 2 to 6, 6 to 9 and 2 to 9 weeks of age (G26, G69 and G29, respectively), carcass protein, carcass ash, femur length, and carcass fat percentage. The analysis of body weight at 2 and 3 weeks of age and G69 produced no significant linkage results. The results for body weight at 6 and 9 weeks of age and for G26 were almost identical to those for G29. In addition, evaluation of phenotypic data from the F₂ cross suggested that hg had a more noticeable effect on growth rates than on live weight differences (Table 1). Therefore, we report here the results corresponding to G29 and carcass composition traits.

TABLE 1
Means and standard deviations (SD) of traits measured in the
C57-hg/hg x CAST F₂ cross.

| | Females | | | | | | |
|---|---|---|---|---|---|---|---|
| | +/+ mice | | | hg/hg mice | | | |
| | n | Mean | SD | n | Mean | SD | Prob |
| Wt2 g | 138 | 8.8 | 1.3 | 130 | 8.6 | 1.5 | N.S. |
| Wt3 g | 139 | 11.5 | 1.7 | 130 | 11.5 | 1.9 | N.S. |
| Wt6 g | 134 | 17.5 | 2.0 | 129 | 20.2 | 3.1 | <0.0001 |
| Wt9 g | 130 | 19.2 | 2.3 | 123 | 23.4 | 3.3 | <0.0001 |
| G29 g | 131 | 10.4 | 2.2 | 123 | 14.8 | 3.1 | <0.0001 |
| Carcass weight g | 129 | 12.42 | 1.86 | 122 | 15.47 | 2.78 | <0.0000 |
| Carcass protein g | 128 | 2.41 | 0.34 | 121 | 2.91 | 0.51 | <0.0001 |
| Carcass ash g | 128 | 0.65 | 0.10 | 122 | 0.81 | 0.16 | <0.0001 |
| Carcass fat % | 128 | 10.4 | 4.0 | 122 | 12.8 | 5.2 | <0.0001 |
| Femur length mm | 127 | 14.5 | 0.6 | 122 | 15.4 | 0.9 | <0.0001 |
| | Males | | | | | | |
| | +/+ Mice | | | hg/hg Mice | | | |
| | n | Mean | SD | n | Mean | SD | Prob |
| Wt2 g | 135 | 9.3 | 1.4 | 130 | 8.6 | 1.4 | <0.0001 |
| Wt3 g | 135 | 12.7 | 1.9 | 130 | 12.1 | 2.2 | <0.05 |
| Wt6 g | 131 | 21.2 | 2.5 | 127 | 24.4 | 4.4 | <0.0001 |
| Wt9 g | 124 | 23.8 | 3.2 | 123 | 28.7 | 4.7 | <0.0001 |
| G29 g | 124 | 14.6 | 2.9 | 123 | 20.1 | 4.2 | <0.0001 |
| Carcass weight g | 130 | 14.99 | 2.13 | 123 | 18.36 | 3.33 | <0.0001 |
| Carcass protein g | 130 | 2.97 | 0.4 | 123 | 3.53 | 0.64 | <0.0001 |
| Carcass ash g | 130 | 0.71 | 0.09 | 123 | 0.85 | 0.15 | <0.0001 |
| Carcass fat % | 130 | 9.6 | 4.5 | 123 | 12.4 | 5.6 | <0.0001 |
| Femur length mm | 130 | 14.9 | 0.6 | 119 | 15.6 | 0.8 | <0.0001 |

Wt2-Wt9: Live weights at 2, 3, 6, and 9 weks of age, respectively.
G29: Weight gai from 2 to 9 weeks of age.

[0310] The threshold to declare significant linkage in the ANOVA was established by choosing a genome-wide P value of 0.10 and applying the Bonferroni correction for multiple comparisons (SAS 1998). Therefore, a nominal value of P 0.006 was considered indicative of linkage in the single-marker analyses. More markers were added in those chromosomes showing significant linkage in the ANOVA, for a total of 79 markers (FIG. 10). The GGT (Graphical Genotypes) software (van Berloo (1999) J. Hered. 90: 328-329) was used to create a graphical display of the genotyped chromosomes in each individual in order to assist in error checking and genotyping quality control.

[0311] In order to determine the location of a locus on a given chromosome, interval mapping was performed using regression analysis (Haleyand Knott (1992) Heredity 69: 315-324). The appropriate programs were written and run with the SAS software (SAS 1998). Before performing the final linkage analysis, the regression programs were tested with the same data set used when hg was mapped (Horvat and Medrano (1995) Genetics 139:1737-1748). The regression analysis produced almost identical results to those using Mapmaker (Lander et al. (1987) Genomics 1: 174-181) in the earlier report.

[0312] Before proceeding to the analysis, we also evaluated positions and orders of our markers using Mapmaker. The estimated distances between markers that we obtained with Mapmaker (Lander et al. (1987) Genomics 1: 174-18 1) were in agreement with the mouse consensus map (MGD 2000); therefore, we used the information from the consensus map for the analysis.

[0313] The regression models included additive (a) and dominance (d) terms, together with the effects of sex and age. Conditioning markers were included in the models to account for background genetic effects (Zeng (1994) Genetics 136: 1457-1468). These markers were selected for each trait by backward regression analysis with a probability of P<0.05. In a first step, single chromosomes were analyzed. In a second step, all significant markers were evaluated together and only those remaining after the backward selection were included in the models. Conditioning markers were omitted from the model when their corresponding chromosomes were analyzed.

[0314] The regression analysis between two markers was performed at 2 cM intervals. The results were expressed as LOD scores, LOD=4.605×Likelihood ratio test (LR), where LR=n×logₑ (RSSreduced/RSSfull) (n is the sample size, and RSSfull and RSSreduced are the Residual Sum of Squares of the complete regression model (full) and the model with the additive (a) and dominance (d) terms omitted (reduced), respectively (Haley and Knott (1992) Heredity 69: 315-324).

[0315] Empirical significance thresholds were calculated using a permutation method (Churchill and Doerge (1994) Genetics 138: 963-971). Phenotypes were permuted against genotypes and conditioning markers and the regression analyses were repeated 1,000 times. The experiment-wise significance threshold, P<0.05 or P<0.01, for each trait was established by choosing the 50th or the 10th highest LOD score across all chromosomes, respectively. The estimated experiment-wise thresholds for the interval mapping had similar values among traits and chromosomes, with extremes of 1.80 for femur length and 2.47 for carcass protein (P<0.05), and 2.65 for carcass protein and 3.25 for carcass ash (P<0.01).

[0316] The most significant markers in the hg/hg subpopulation were also typed in the +/+ subpopulation in order to verify whether the same loci were detected as QTL in the genetic background carrying the wild type allele at the hg locus. Chromosome 2 seemed to harbor genes with very strong effect on growth, both in the +/+ and hg/hg subpopulations. Therefore, we genotyped the +/+ mice with the same set of markers that we used on hg/hg mice. Interval mapping was performed as described above.

[0317] To confirm the linkage of markers D2Mit389 and D2Mit260 to QTL in chromosome 2 in an independent population, we performed selective genotyping in the F₂ cross (N=330) that did not segregate hg. Data on weight gain from 3 to 6 weeks of age was corrected for the effects of dam, litter, and parity with the GLM procedure of SAS (SAS 1998). The mice were ranked based on the adjusted data and 24 mice (12 from each sex) from the extreme ends of the F2 distribution were typed. The means of the high and low weight gain groups were 1.83 standard deviations above and 1.68 standard deviations below the population mean, respectively. For each marker a chi-square test was performed with the FREQ procedure of SAS (SAS 1998) to compare allele frequencies between the two groups.

### Results

[0318] As a relative comparison of the size of +/+ and hg/hg mice the phenotypic means of traits recorded in our F₂ population are presented in Table 1. At 2 and 3 weeks of age, there were no significant differences in weight between +/+ and hg/hg females. However, hg/hg males were smaller than +/+ mice at the same ages. At 6 and 9 weeks of age, hg/hg mice of both sexes were significantly heavier than the wild type mice. These results show that hg/hg mice grew faster than +/+ mice, especially after weaning. In fact, a significant genotype x sex interaction was detected for weight gain between 2 and 9 weeks of age. Among females, hg/hg mice gained 42% more weight than +/+ mice, whereas the difference in weight gain for males was 38%. The increased growth rate of hg/hg mice is typical of the effect of this locus (Bradford and Famula (1984) Genet. Res. 44: 293-308).

[0319] At sacrifice, hg/hg mice had heavier carcasses than +/+ mice. The carcasses of hg/hg mice had more protein and ash, a longer femur, and a higher fat content than the carcasses of +/+ mice (Table 1).

[0320] Eight chromosomes harboring significant markers where identified with ANOVA and then analyzed by interval mapping. Eight loci were identified through interval mapping, which were designated Q2Ucd1, Q2Ucd2, Q5Ucd1, Q8Ucd1, Q9Ucd1, Q9Ucd2, Q11Ucd1 and Q17Ucd1 (Table 2). Markers on chromosomes 13 and X were identified as significant in the ANOVA but did not reach the minimum significance thresholds by interval mapping. No significant sex-specific effects were detected in our scan.

[0321] Significant loci identified in hg/hg mice can be arbitrarily placed in four groups. Group 1: Loci in chromosomes 2 and 8 (Q2Ucd1 and Q8Ucd1) which affected only the growth rate of F₂ mice. Group II: Loci on chromosomes 2 and 11 (Q2Ucd2 and Q11Ucd1) that affected growth rate and carcass lean mass (protein and ash). Although we conducted independent analyses for each trait, the consistency in the location of these two loci in the different analyses made us consider that the same locus was affecting more than one trait, which is highly suggestive of pleiotropy. Group III: Loci on chromosome 9 (Q9Ucd2) that modified femur length and chromosome 17 (Q17Ucd1) that modified carcass lean mass (protein and ash) and femur length. These two loci had no effect on growth rate. For chromosome 17, we also assumed that a single locus was affecting two different traits. Group IV: Loci on chromosomes 5 and 9 (Q5Ucd1 and Q9Ucd1) that modified carcass fat content. QTL displayed various gene action modes (Table 2) from additivity (e.g., Q17Ucd1-p), dominance (e.g., Q2Ucd1-femur), partial dominance (e.g., Q11Ucd1-p) to overdominance (e.g., Q2Ucd2-wg29).

TABLE 2
Most likely locations and effects of loci detected in the hg/hg subpopulation.

| | | | Location | | Additivity | Dominance | |
|---|---|---|---|---|---|---|---|
| Trait | Locus¹ | Chrom. | (Cm) | LOD² | (SE) | ((SE) | % Vp³ |
| Weight gain | Q2Ucd1-wg29 | 2 | 31 | 3.75 | 1.174 | 0.841 | 4.2 |
| | | | | | (0.327) | (0.463) | |
| 2-9 wk (g) | Q2Ucd2-wg29 | 2 | 61 | 7.43 | 1.309 | 2.286 | 10.4 |
| | | | | | (0.319) | (0.509) | |
| | Q8Ucd1-wg29 | 8 | 45 | 3.01 | 0.892 | 1.397 | 4.3 |
| | | | | | (0.328) | (0.512) | |
| | Q11Ucd1-wg29 | 11 | 46 | 3.41 | 1.283 | 0.320 | 4.1 |
| | | | | | (0.324) | (0.491) | |
| Carcass | Q2Ucd2-p | 2 | 63 | 4.89 | 0.165 | 0.272 | 7.6 |
| | | | | | (0.043) | (0.079) | |
| Protein (g) | Q11Ucd1-p | 11 | 46 | 5.01 | 0.206 | 0.111 | 5.7 |
| | | | | | (0.042) | (0.064) | |
| | Q17Ucd1-p | 17 | 46 | 4.77 | 0.231 | −0.054 | 6.5 |
| | | | | | (0.048) | (0.069) | |
| Carcass | Q2Ucd2-ash | 2 | 63 | 4.34 | 0.037 | 0.062 | 6.9 |
| | | | | | (0.011) | (0.017) | |
| Ash (g) | Q11Ucd1-ash | 11 | 50 | 3.18 | 0.039 | 0.026 | 3.9 |
| | | | | | (0.010) | (0.015) | |
| | Q17Ucd1-ash | 17 | 48 | 3.67 | 0.048 | −0.009 | 4.9 |
| | | | | | (0.011) | (0.015) | |
| Carcass | Q5Ucd1-fp | 5 | 38 | 2.46 | −1.642 | 0.270 | 6.2 |
| | | | | | (0.492) | (0.766) | |
| Fat (%) | Q9Ucd1-fp | 9 | 10 | 5.83 | −2.347 | 0.562 | 12.5 |
| | | | | | (0.454) | (0.744) | |
| Femur | Q2Ucd2- | 2 | 59 | 2.72 | 0.202 | 0.207 | 4.2 |
| | femur | | | | (0.068) | (0.107) | |
| length (mm) | Q9Ucd2- | 9 | 20 | 6.34 | 0.365 | 0.224 | 10.7 |
| | femur | | | | (0.072) | (0.112) | |
| | Q17Ucd1- | 17 | 48 | 3.51 | 0.305 | −0.087 | 6.6 |
| | femur | | | | (0.071) | (0.096) | |

¹Locus nomenclature: Q for QTL, chromosome #, Ucd for University of California, a consecutive number for each QTL on a chromosome, and a letter code referring to the Phenotype. QTL affecting more than one trait are distinguished by the phenotype code.
²LOD scores were significant at P < 0.01, with the exception of LODs for Q5Ucdl-fp and Q2Ucd2-femur that were significant the P < 0.05.
³% Vp, % of Phenotypic Variance explained by the QTL. % Vp = VG * 100/Vp, where VG = ½a2 + ¼d2.

[0322] The loci affecting growth rate and carcass lean mass individually explained 4.1% to 10.4% of the phenotypic variance on weight gain in the hg/hg subpopulation. The locus Q2Ucd2 had very significant effects on all the studied traits with the exception of fat percentage. On the other side, the two significant loci Q5Ucd1 and Q9Ucd1 explained 6.2% and 12.5% of the phenotypic variance for fat content in the hg/hg subpopulation, respectively (Table 2). Interestingly, the C57 alleles have a positive additive effect for all the identified loci with the exception of loci Q5Ucd1 and Q9Ucd1, for which the CAST alleles were responsible for increasing carcass fat percentage.

[0323] In order to identify modifiers of hg, we genotyped the marker that was closest to the significant QTL in the hg/hg group. Also in the +/+ mice of the F₂ cross. four markers showed statistically significant interactions in the ANOVA (nominal P<0.05) (FIG. 11). Interestingly, these markers are examples of three different types of genetic interaction. Marker D2Mit389 on chromosome 2 (close to Q2Ucd2) had an additive effect on weight gain on +/+ mice, but became dominant in the presence of hg. The locus on chromosome 17 (Q17Ucd1) modifying femur length, which had an additive effect in hg/hg mice, tended to be dominant in +/+ mice. Loci on chromosomes 9 and 11 (Q9Ucd1 and Q11Ucd1) that affected carcass fatness and carcass protein mass in an additive manner in the hg/hg mice had no significant effects in +/+ mice.

[0324] In view of the importance of the effect of Q2Ucd2 on growth rate and carcass lean mass of hg/hg mice, we genotyped the +/+ mice with the same markers of chromosome 2 and performed the interval mapping for growth rate (G29) and carcass composition traits (FIG. 12). It can be seen that the LOD curves have distinctive patterns in each subpopulation and that the highest LOD scores in each case corresponded to different positions on the chromosome. In +/+ mice, a very significant locus affecting growth rate and carcass lean mass was detected distal to the location of Q2Ucd2.

[0325] In order to confirm the existence of the two important loci found on chromosome 2 of hg/hg and +/+ mice, we selectively genotyped a C57×CAST F2 cross with markers D2Mit389 and D2Mit260. For D2Mit389, the frequency of the C57 allele in the groups of high and low weight gain were 0.65 and 0.33, respectively (Chi-square =10.3, P<0.0013, n=24), whereas the corresponding frequencies for D2Mit260 were 0.65 and 0.29, respectively (Chi-square=12.9, P<0.0003, n=24). These results indicate that both markers were linked to QTL and that it was not an artifact of the F₂ cross-segregating hg.

### Discussion

[0326] It has been suggested that in terms of genetic analysis, our knowledge about the genome is progressing faster than our understanding of the phenotype, a situation that has been addressed as a “phenotype gap” (Graham et al. (1998) Genet. Res. 72: 247-253). Given the complexity of the regulation of animal growth, a good characterization of the phenotype, and novel strategies for genetic analysis would help in understanding the regulation of growth and body size. In this study, we have contributed to that understanding by describing the influence of the genetic background on a major locus affecting growth.

[0327] Our genome-wide scan identified eight loci responsible for the differences in growth among hg/hg mice. The traits that we measured allowed us to distinguish loci that affected growth rate from those affecting body size and carcass composition. Growth rate and body size have a positive genetic correlation (Bishop and Hill (1985) Genet. Res. 46: 57-74); however, we found loci that affected both traits independently. Although we were primarily interested in the influence of hg on linear growth, we included the analysis of body composition based on previous knowledge about the variability between CAST and C57, not only in size and body composition (York et al. (1996) Mamm. Genome 7: 677-681). These distinguishing features between lines made the C57×CAST cross an ideal material for evaluating the effects of a major locus affecting growth.

[0328] In our search for modifiers we detected significant two-way interactions between four loci and hg (Q2Ucd2, Q9Ucd1, Q11Ucd1, Q17Ucd1). The comparison of means between the hg/hg and +/+ subpopulations for selected markers proved that not all the loci that modulated the effects of hg on growth were present in the +/+ F₂ mice. Additionally, some loci that were significant in both backgrounds had a different type of genetic action depending on the background. This result emphasizes the relevance of epistasis in the genetic regulation of growth in mammals (Routman and Cheverud (1997) Evolution 51: 1654-1662).

[0329] A large number of growth QTL have been reported in the literature. We found agreement in the position of QTL in hg/hg mice and other QTL affecting growth and body composition, which could imply that the same genes are being detected. Although we list below the comparisons of QTL positions between our cross and other crosses, we would like to make a cautionary note that such comparisons are problematic and may be questionable. It has been shown (Keightley and Knott (1999) Genet. Res. 74: 323-328) that getting a statistically significant correlation between two QTL mapping experiments (i.e. that the same QTL segregates in two crosses) would be unlikely especially for cases where the variation in the trait is explained by a large number of QTL and where experimental populations are not closely related, which is the case with the experiments compared here.

[0330] Cheverud et al. (1996) Genetics 142: 1305-1319, reported a QTL for early weight gain (1 to 3 weeks of age) on chromosome 2 in the LG/J×SM/J cross, in a similar position to Q2Ucd2. Loci affecting 6-week weight on chromosomes 2 and 11 were reported by Brockmann et al. (1998) Genetics 150, 369-381 in the DUK×DU6 cross, in the corresponding regions to where we mapped Q2Ucd2 and Q11Ucd1, respectively. In addition, a significant locus in the vicinity of Q11Ucd1 was identified by Keightley et al. (1996) Genetics 142: 227-235, in a line selected for high 6-week weight. We were not able to find information on other growth QTL mapping to the locations of Q2Ucd1, Q8Ucd1 or Q17Ucd1.

[0331] A QTL affecting adult body weight in a C57×CAST cross has been mapped to the same region in chromosome 2 where we found a very significant QTL in +/+ mice (region around 80-90 cM) (Mehrabian et al. (1998) J. Clin. Invest. 101: 2485-2496). A very large confidence interval reported for the location of that locus, together with the pattern of LOD scores along the chromosome, suggest that a second locus, probably at the same location of Q2Ucd2, could have affected body weight in that experiment. Also, an adult body weight QTL mapping to the distal region of chromosome 2 has been identified in the NZB/BINJ×SM/J cross (Lembertas et al. (1997) J. Clin. Invest. 100: 1240-1247).

[0332] Results of genomic scans for obesity QTL on C57×CAST crosses have been reported (York et al. (1996) Mamm. Genome 7: 677-681; Lembertas et al. (1997) J. Clin. Invest. 100: 1240-1247). Our loci Q5Ucd1 and Q9Ucd1 were not detected in those experiments. Because high fat diets were used in the two cited experiments, their results are not strictly comparable to ours. However, we did not detect those two loci as significant in the +/+ subpopulation either. There is evidence in the literature of loci affecting carcass composition in similar locations to Q5Ucd1 and Q9Ucd1. Taylor and Phillips (1999) Mamm. Genome 10: 963-968suggested the existence of a putative obesity QTL in the central portion of chromosome 5 in a 129/Sv×EL/Suz cross. Also, the locus Obq5 identified in a C57×KK/HlLt cross, which affected several adiposity-related traits mapped close to Q9Ucd1. Together, these results indicate that hg produced metabolic changes beyond the effects on growth rate and body size. Interestingly, hg/hg F2 mice were on average fatter than their wild type counterparts (Table 1). Previous experiments comparing the body composition of hg/hg and control mice found differences in carcass composition of the magnitude reported here (Calvert et al. (1984) J. Anim. Sci. 59: 361-365). The CAST alleles at Q5Ucd1 and Q9Ucd1 increased carcass fat content, but only in hg/hg mice (Table 2). Therefore, this particular effect on body composition could involve specific alleles from CAST origin interacting with hg. This result is not surprising. It has been confirmed for both body weight (Cheverud et al. (1996) Genetics 142: 1305-1319) and body composition (Mehrabian et al. (1998) J. Clin. Invest. 101: 2485-2496) that alleles that increase the phenotypic mean of a trait in a mapping cross may come from the parental inbred line with the lower phenotypic mean for that trait.

[0333] Among the QTL detected in hg/hg mice there are loci that influenced both growth rate and final body size, and loci that affected each trait independently (Table 2). The final body size of an animal is mostly a function of its cell mass, which in turn results from the product of cell number and cell size (Conlon and Raff (1999) Cell 96: 235-244). Although there is agreement about the existence of a genetic regulation of those parameters, little is known about how the changes in cell number and size that lead to a change in body mass are coordinated with time (Su and O'Farrell (1998) Curr. Biol. 8: 8687-689; Conlon and Raff (1999) Cell 96: 235-244). Our results confirm that although there are genetic factors underlying a connection between final body size and the time taken to achieve it (Webster AJF (1989) Anim. Prod. 48, 249-269), there are genes that act independently on each of those variables, probably through alterations of the dynamics of cell proliferation, cell enlargement, or both (Su and O'Farrell (1998) Curr. Biol. 8: 8687-689; Conlon and Raff (1999) Cell 96: 235-244).

[0334] The regulation of growth rate and ultimately body size can be regarded to be a result of the balance between growth promoting and growth inhibiting factors (Efstratiadis (1998) Int. J. Dev. Biol. 42: 955-976). The recent discovery of myostatin, a negative regulator of muscle mass, is consequent with the existence of growth inhibitors (McPherron et al. (1997) Nature 387: 83-90; Lee and McPherron (1999) Curr. Opin. Genet. Dev. 9: 604-607). The product of the hg locus could be one of those growth-inhibiting factors and its modifiers could well be genes associated with inhibitory pathways that set limits to the growth process. Recently the hg phenotype has been identified as resulting from a lack of expression of the suppressor of cytokine signaling 2 (Socs2 or Cish2; see Examples herein). Also, identification of modifiers of hg, detected here, will be of value in identifying the genes involved in the functional pathways leading to variation in phenotypic size in different genetic backgrounds. For example, high levels of IGF-I have been consistently reported in hg/hg mice (Medrano et al. (1991) Genet. Res. 58: 67-74; Reiser et al. (1996) Am. J. Physiol. 271: 8696-703). At least some of the modifiers that we report here could ultimately be genes involved in pathways influenced by IGF-I. It is also possible that interactions between the hg allele (lack of Socs2) and modifiers of hg are responsible for some of the reproductive problems that have been documented in this mutation (Cargill et al. (1999) Biol. Reprod. 61: 283-287). It would be useful, therefore, to fine map modifiers of hg and ultimately positionally clone them.

### Example 4

### High Growth Mouse Research Update

[0335] The high growth mutation was found in a strain of mice selected for high 3 to 6 week post-weaning weight gain. The mutation causes a major increase in growth (30-50% in homozygotes) that is proportional in all tissues and organs and does not result in obesity. High growth (HG) mice are on average 13% leaner but much higher in weight than controls at the same age. This effect is particularly noticeable when control and HG mice are fed high-energy diets. The mutation alters energy metabolism by increasing efficiency of growth and/or decreasing maintenance energy requirements. The effects of the mutation are detected early in development, manifested by delayed muscular cell fusion and an increase in muscle fiber number (Summers, and Medrano (1994) Growth, Devel & Aging 58: 135-148; Summers and Medrano (1996) J. Experimental Biology and Medicine 214: 380-385). Interestingly, High Growth mice have lower concentrations of Growth Hormone (GH) but much higher concentrations of Insulin-like Growth Factor I (IGF-I) in their plasma than normal mice (Medrano et al. (1991) Genetical Research 58: 67-74; Reiser et al. (1996) American journal of physiology-regulatory integrative and comparative Physiology 40: R696-R703; Corva, and Medrano (2000) Physiological Genomics 3:17-23).

[0336] We initially localized hg by interval mapping to the distal half of mouse chromosome 10 and confirmed its location by test-crossing (see Examples herein and Horvat and Medrano (1995) Genetics 139: 1737-1748). This was followed by the development of new fine mapping markers (see Examples herein and Horvat and Medrano (1996) Genomics 36: 546-549) and by the mapping of hg to a 500-kb deletion. A YAC/BAC contig map spanning the deletion was developed and the Raidd/Cradd gene was identified within the deletion as a potential candidate for hg (see Examp sherein and Horvat and Medrano (1998) Genomics 54:159-164). We have shotgun sequenced 6 BAC clones spanning the hg deletion to identify potential transcripts. Our sequence covers approximately 650,000 bp and it is composed of 13 contigs (see e.g., SEQ ID NO: 20). Clones spanning the ends of these contigs are currently being sequenced to close the gaps.

[0337] A brief description of the genes in the high growth region is included. FIG. 14 shows the pattern of expression of these genes in control and HG mice.

### Socs2/Cish2 (suppressor of cytokine signaling 2/cytokine-inducible SH2-containing protein 2)

[0338] Socs2 is the name of the gene according to the human nomenclature and Cish2 is the name according to the mouse nomenclature: Socs2/Cish2 is a member of a gene family of negative regulators of cytokines. Citokines are secreted proteins that interact with specific cell surface receptors, triggering cytoplasmic signal transduction pathways that transmit the signal to the nucleus and initiate changes in transcription.

[0339] Socs2 is not expressed in hg mice, eliminating a negative regulation of signaling from growth-promoting cytokines. Our earlier observations that HG mice have low plasma levels of growth hormone with no pulsatile effect, as well as high levels of IGF-1, are consistent with the effect that the lack of Socs2 may have as a regulator of growth hormone and IGF-1 signaling. Socs2 has been shown to act as a suppressor of growth hormone signaling and to directly interact with the IGF-1 receptor.

[0340] For a growth control gene with an inhibitory function like Socs2, it is expected that the lack of expression has a growth-promoting effect, and overexpression has growth-inhibiting effect. Therefore, manipulation of Socs2 protein expression is expected to be useful in domestic animals as a strategy for improving animal growth, and in human medicine for treating growth disorders.

### Raidd/Cradd (RIP-Associated ICDH/CED-3-Homologous Protein with DD/Caspase and RIP Adapter with DD)

[0341] Apotosis, or programmed cell death, occurs during normal cellular differentiation and development of multicellular organisms. Apotosis is induced by certain cytokines including TNF, TNFR-1 and Fas. The death signals are transduced by a group of DD (death domain)-containing adapter molecules. RAIDD is one of these adapter molecules, which interacts with RIP and caspase-2 to transduce death signals.

[0342] Raidd/Cradd originally appeared as a very good candidate for the high growth phenotype. As stated above, the main characteristic of HG is the increase in postnatal growth, resulting in an increase in muscle mass and in the size of tissues and organs. Therefore, HG mice are most likely bigger because they have more cells, not because their cells are larger. These differences in cell number may have been due to a perturbed apoptosis program caused by a lack of function of Raidd/Cradd in the apoptotic-signaling pathway. However, Raidd/Cradd knockout mice do not exhibit increased growth or any obvious phenotypic difference. Therefore, questions remain on the function and the role this gene may have in relation to the high growth phenotype and if it interacts with Socs2/Cish2 in the resulting phenotype.

### Vespr (Viral Encoded Semaphorin Receptor)

[0343] Semaphorins and their receptors are molecules that act as mediators of immune function. Semaphorins comprise a large family of secreted and transmembrane proteins, some of which deliver guidance cues to migrating axons during development. Semaphorins have also been identified on the surface of hematopoietic cells and in the genome of certain lytic viruses. In the immune system, VESPR, a member of the Plexin family, is a receptor for a viral-encoded Semaphorin. (Weinberg et al. (1998) Cell 95: 903-916). The gene is primarily expressed in brain tissue, in both HG and control mice. Mouse Vespr is a large gene and protein (mRNA 4725 bp, protein 1574 amino acids). The mRNA sequence of the gene has been published in GenBank (accession # AF190578). FIG. 14: mRNA Northern blot showing the lack of expression of Socs2/Cish2 and Raidd/Cradd in various tissues (L, liver; B, brain, K, kidney; H, heart; Lu, lung; M, muscle; T, testis; E, 13d. embryo) in high growth (hg/hg) mice and the positive expression of Vespr in comparison to control mice (+/+).

[0344] We have also completed a genome scan in F₂ hg/hg mice to identify contributing QTL to the high growth effect (see Examples herein). Eight significant loci were identified through interval mapping. Loci on chromosomes 2 and 8 affected the growth rate, loci on chromosomes 2 and 11 affected growth rate and carcass lean mass (protein and ash). A locus on chromosome 9 modified femur length and another one in chromosome 17 affected both carcass lean mass and femur length. Loci on chromosomes 5 and 9 modified carcass fat content. Significant interactions between hg and other growth QTL were identified, which were detected as changes in gene action (additive or dominant) and in allele substitution effects.

[0345] It is understood that the examples and embodiments described herein are for illustrative purposes only and that various modifications or changes in light thereof will be suggested to persons skilled in the art and are to be included within the spirit and purview of this application and scope of the appended claims. All publications, patents, and patent applications cited herein are hereby incorporated by reference in their entirety for all purposes.

What is claimed is:

1. An isolated nucleic acid molecule encoding a gene product that, when knocked out, results in a high growth (hg) phenotype.

2. The nucleic acid of clam 1, wherein said nucleic acid comprises the nucleotide sequence of SEQ ID NO: 9.

3. The nucleic acid of claim 1, wherein said nucleic acid is present in a vector.

4. The nucleic acid of claim 1, wherein said nucleic acid is a DNA.

5. The nucleic acid of claim 1, comprising the nucleic acid or the complement of the nucleic acid of SEQ ID NO: 9.

6. A cell transfected with a nucleic acid molecule encoding a gene product that, when knocked out, results in a high growth (hg) phenotype.

7. The cell of claim 4, wherein said cell is a mammalian cell.

8. A method of producing an animal characterized by a high growth phenotype, said method comprising inhibiting expression of a Socs2 gene.

9. The method of claim 8, wherein said inhibiting is by disrupting said gene by homologous recombination with a nucleic acid that undergoes homologous recombination with a Socs2 gene and introduces a disruption in said Socs2 gene.

10. The method of claim 9, wherein said nucleic acid encodes a selectable marker.

11. The method of claim 10, wherein said selectable marker is as neo or a hyg gene or cDNA.

12. A knockout mammal, said mammal comprising cells containing a recombinantly introduced disruption in a Socs2 gene, wherein said disruption results in said knockout mammal exhibiting decreased levels of SOCS2 protein as compared to a wild-type mammal.

13. The knockout mammal of claim 12, wherein said mammal displays a high growth (hg) phenotype.

14. The knockout mammal of claim 12, wherein said mammal is selected from the group consisting of an equine, a bovine, a rodent, a porcine, a lagomorph, a feline, a canine, a murine, a caprine, an ovine, and a non-human primate.

15. The knockout mammal of claim 12, wherein, wherein the disruption is selected from the group consisting of an insertion, a deletion, a frameshift mutation, a substitution, and a stop codon.

16. The knockout mammal of claim 15, wherein, wherein said disruption comprises an insertion of an expression cassette into the endogenous Socs2 gene.

17. The knockout mammal of claim 16, wherein, wherein said disruption comprises an expression cassette comprising a selectable marker.

18. The knockout mammal of claim 16, wherein the expression cassette comprises a neomycin phosphotransferase gene operably linked to at least one regulatory element.

19. The knockout mammal of claim 12, wherein said disruption is in a somatic cell.

20. The knockout mammal of claim 12, wherein said disruption is in a germ cell.

21. The knockout mammal of claim 12, wherein the mammal is homozygous for the disrupted Socs2 gene.

22. The knockout mammal of claim 12, wherein the mammal is heterozygous for the disrupted Socs2 gene.

23. The knockout mammal of claim 12, wherein said mammal further comprises a second recombinantly disrupted gene.

24. The knockout mammal of claim 23, wherein said second gene comprises a disruption that prevents the expression of a functional polypeptide from said disrupted second gene.

25. The knockout mammal of claim 23, wherein the mammal is homozygous for said disrupted second gene.

26. The knockout mammal of claim 23, wherein the mammal is heterozygous for said disrupted second gene.

27. A knockout rodent comprising a recombinantly introduced disruption in an endogenous SOCS2 gene (Socs2) wherein said disruption results in said knockout rodent exhibiting decreased levels of SOCS2 protein as compared to a wild-type rodent.

28. The knockout rodent of claim 27, wherein said mammal displays a high growth (hg) phenotype.

29. The knockout rodent of claim 27, wherein, wherein the disruption is selected from the group consisting of an insertion, a deletion, a frameshift mutation, a substitution, and a stop codon.

30. The knockout rodent of claim 27, wherein, wherein said disruption comprises an insertion of an expression cassette into the endogenous Socs2 gene.

31. The knockout mammal of claim 30, wherein, wherein said disruption comprises an expression cassette comprising a selectable marker.

32. The knockout mammal of claim 30, wherein the expression cassette comprises a neomycin phosphotransferase gene operably linked to at least one regulatory element.

33. The knockout rodent of claim 27, wherein said disruption is in a somatic cell.

34. The knockout rodent of claim 27, wherein said disruption is in a germ cell.

35. The knockout rodent of claim 27, wherein the rodent is homozygous for the disrupted Socs2 gene.

36. The knockout rodent of claim 27, wherein the rodent is heterozygous for the disrupted Socs2 gene.

37. A method of screening for an agent that modulates expression of a high growth (hg) phenotype, said method comprising:
contacting a cell comprising a Socs2 gene with a test agent; and
detecting a change in the expression or activity of a Socs2 gene product as compared to the expression or activity of a Socs2 gene product in a cell that is contacted with the test agent at a lower concentration, where a difference in the expression or activity of Socs2 in the contacted cell and the cell that is contacted with the lower concentration indicates that said agent modulates expression of a high growth phenotype.

38. The method of claim 37, wherein said lower concentration is the absence of said test agent.

39. The method of claim 37, wherein the amount of Socs2 gene product is detected by detecting Socs2 mRNA in said sample.

40. The method of claim 39, wherein said level of Socs2 mRNA is measured by hybridizing said mRNA to a probe that specifically hybridizes to a Socs2 nucleic acid.

41. The method of claim 40, wherein said hybridizing is according to a method selected from the group consisting of a Northern blot, a Southern blot using DNA derived from the Socs2 RNA, an array hybridization, an affinity chromatography, and an in situ hybridization.

42. The method of claim 40, wherein said probe is a member of a plurality of probes that forms an array of probes.

43. The method of claim 39, wherein the level of Socs2 mRNA is measured using a nucleic acid amplification reaction.

44. The method of claim 37, wherein the amount of Socs2 gene product is detected by detecting the level of a Socs2 protein in said biological sample.

45. The method of claim 37, wherein said detecting is via a method selected from the group consisting of capillary electrophoresis, a Western blot, mass spectroscopy, ELISA, immunochromatography, and immunohistochemistry.

46. The method of claim 37, wherein said cell is cultured ex vivo.

47. The method of claim 37, wherein said test agent is contacted to an animal comprising a cell containing the Socs2 nucleic acid or the Socs2 protein.

48. A method of prescreening for an agent that alters the expression of a high growth phenotype, said method comprising:
i) contacting a Socs2 nucleic acid or a Socs2 protein with a test agent; and
ii) detecting specific binding of said test agent to said Socs2 protein or nucleic acid.

49. The method of claim 48, further comprising recording test agents that specifically bind to said Socs2 nucleic acid or protein in a database of candidate agents that alter hg phenotype development.

50. The method of claim 48, wherein said test agent is not an antibody.

51. The method of claim 48, wherein said test agent is not a protein.

52. The method of claim 48, wherein said test agent is not a nucleic acid.

53. The method of claim 48, wherein said test agent is a small organic molecule.

54. The method of claim 48, wherein said detecting comprises detecting specific binding of said test agent to said Socs2 nucleic acid.

55. The method of claim 54, wherein said binding is detected using a method selected from the group consisting of a Northern blot, a Southern blot using DNA derived from a Socs2 RNA, an array hybridization, an affinity chromatography, and an in situ hybridization.

56. The method of claim 48, wherein said detecting comprises detecting specific binding of said test agent to said Socs2 protein.

57. The method of claim 48, wherein said detecting is via a method selected from the group consisting of capillary electrophoresis, a Western blot, mass spectroscopy, ELISA, immunochromatography, and immunohistochemistry.

58. The method of claim 48, wherein said test agent is contacted directly to the Socs2 nucleic acid or to the Socs2 protein.

59. The method of claim 48, wherein said test agent is contacted to a cell containing the Socs2 nucleic acid or the Socs2 protein.

60. The method of claim 59, wherein said cell is cultured ex vivo.

61. The method of claim 48, wherein said test agent is contacted to an animal comprising a cell containing the Socs2 nucleic acid or the Socs2 protein.

62. An isolated nucleic acid comprising a nucleic acid selected from the group consisting of:
a nucleic acid that specifically hybridizes to a nucleic acid selected from the group consisting of SEQ ID NO:2, and SEQ ID NO: 9 under stringent conditions;
nucleic acid comprising a nucleic acid sequence selected from the group consisting of SEQ ID NO:2, and SEQ ID NO: 9.

63. The nucleic acid of claim 62, wherein said nucleic acid is at least 15 nucleotides in length.

64. A polypeptide comprising a polypeptide encoded by a nucleic acid of claim 62.

65. An antibody that specifically binds a polypeptide of claim 64.

66. A nucleic acid for disrupting a SOCS2 gene (Socs2), said nucleic acid comprising:
SOCS2 gene sequences that undergo homologous recombination with an endogenous SOCS2 gene: and
a nucleic acid sequence that, when introduced into a SOCS2 gene inhibits the expression of said SOCS2 gene.

67. The nucleic acid of claim 66, wherein said nucleic acid when introduced into a SOCS2 gene creates a disruption selected from the group consisting of an insertion, a deletion, a frameshift mutation, and a stop codon.

68. The nucleic acid of claim 66, wherein the disruption comprises the insertion of an expression cassette into the endogenous SOCS2 gene.

69. The nucleic acid of claim 66, wherein the expression cassette comprises a selectable marker.

70. The nucleic acid of claim 66, wherein said nucleic acid comprises Socs2 nucleic acid sequences flanking a nucleic acid encoding a Socs2 disruption.

71. The nucleic acid of claim 66, wherein said nucleic acid is present in a vector.

72. An animal cell comprising a recombinantly introduced disruption in an endogenous SOCS2 gene (Socs2) wherein said disruption results in said cell exhibiting decreased levels of SOCS2 protein as compared to a wild-type cell.

73. The cell of claim 72, wherein said cell of a animal is selected from the group consisting of a chicken, a turkey, a duck, a goose, an equine, a bovine, a rodent, a porcine, a lagomorph, a feline, a canine, a murine, a caprine, an ovine, and a non-human primate.

74. The cell of claim 72, wherein the cell is a rodent cell.

75. The cell of claim 72, wherein the disruption is selected from the group consisting of an insertion, a deletion, a frameshift mutation, and a stop codon.

76. The cell of claim 72, wherein the disruption comprises an insertion of an expression cassette into the endogenous SOCS2 gene.

The application's sequence listing, which the Patent Office published only in electronic form, follows.

SEQUENCE LISTING (20 sequences)

SEQ ID NO: 1 - DNA, 1667 bp, Mus musculus
ttgccctcaacaaagatggtctttatggtacaggttccctagcagtctggattccggttgtagttttagttattcttttttttttttttttaaacggtacgtggtcgcagacgaagaaatggaagccagagacaagcaggtactccgctccctgcgtctggagctgggtgccgaggtactggtggaaggactggttcttcagtacctttaccaggaaggaattttgacagaaaaccacattcaagaaatcaaagctcaaaccacaggcctccggaagacaatgctgttgctggacatcctgccttccaggggccccaaagcttttgacaccttcctcgattccctccaggaatttccctgggtaagagagaagctggagaaggcgagagaggaagtctcagccgagctgcctacaggtgactggatggccggaatcccctcacacatcctcagcagctcgccatcagaccagcagattaaccagctggctcagaggctaggcccggagtgggagcccgtggtcctgtctctgggactgtcccagaccgacatctaccgctgcaaggccaaccatccccacaacgtgcattcgcaggtggtggaggcctttgtccgctggcgccagcgttttgggaagcaggccaccttcctaagcttacacaagggcctccaggcaatggaggctgatccctccctgctccagcacatgctggagtgacctgacccccccccgcgccccccccccacttgctgtgggggtggtggggcgtgggttcccaagtcacactggctgaaccggacttttctcagcaggtggctttgttctgggcttttcagtgatctgtttacggaaagagatcgtccaccactcactcaaccatcgattggctttaattgcttgaagactgcgctgttgtaactatggtttggaactttgtggctggcctttaacaggaggccagaaaaaacacaacacccaccctacccaaccccccaaaaaatcatgctacagcatcgaatgcaggtgtcctgcatacaaggcagctacacttgtgttgcctggagactggattgtgcatttagctcttcataatggtgatgataataaaaaagcaaattgtgatatagaatgtgcctctttcaatgagagagtattatatcacacacacacacacacacacacacacacatacacacacacacaccaatcttctgttgcatagacggagggtgtaaaaatatgggagtggagcaagattgatagcagtcatgtgacgacggagataaataactcaggcaggatgtatagattaagcatgagacaccgaagctccctgcagaggccagggagagaacggaagaccttcatcttaacaaattgtatgaggagtctctgtccatttgttaaaggcattggatcagagacaagagggctcagtgtttctcttgaggcctgaatggctgaaggcggtgagttcccgaggggcgtcatgggttgtccagcctttcattaactgcacatagtgttagccagacaggtgtacgtgtttgtcatcccatctaagagactgaagcaggaggatcacctgtacatgactgcttctttcaacattttaaaatgtgtaacttctattaaattctctcagtgcaaaaaaaaaaaaaaaaaa

SEQ ID NO: 2 - DNA, 304 bp, Mus musculus
gaagaaatggaagccagagacaagcaggtactccgctccctgcgtctggagctgggtgccgaggtactggtggaaggactggttcttcagtacctttaccaggaaggaattttgacagaaaaccacattcaacaaatcaaagctcaaaccacaggcctccggaagacaatgctgttgctggacatcctgccttccaggggccccaaagcttttgacaccttcctcgattccctccaggaatttccctgggtaagagagaagctggagaaggcgagagaggaagtctcagccgagctgcctacag

SEQ ID NO: 3 - DNA, 160 bp, bovine sp
ggaaatggaggctagagacaagcaagtgcttcgctcccttcgcctggagttgggtgcagaggtactggtggaggggctagtcctccagtatctttatcaggaaggggtcttgacagaaagccacgttcaagaaattaaagctcaagccacaggcctccgg

SEQ ID NO: 4 - protein, 539 aa, Mus musculus
METGLALAARGASPLYSGLNVALLEARGSERLEARGLEGLLEGLYALAGLVALLEVALGLGLYLEVALLEGLNTYRLETYRGLNGLGLYILELETHRGLASNHISILEGLNGLILELYSALAGLNTHRTHRGLYLEARGLYSTHRMETLELELEASPILELEPRSERARGGLYPRLYSALAPHEASPTHRPHELEASPSERLEGLNGLPHEPRTRPVALARGGLLYSLEGLLYSALAARGGLGLVALSERALAGLLEPRTHRGLYASPTRPMETALAGLYILEPRSERHISILELESERSERSERPRSERASPGLNGLNILEASNGLNLEALAGLNARGLEGLYPRGLTRPGLPRVALVALLESERLEGLYLESERGLNTHRASPILETYRARGCYSLYSALAASNHISPRHISASNVALHISSERGLNVALVALGLALAPHEVALARGTRPARGGLNARGPHEGLYLYSGLNALATHRPHELESERLEHISLYSGLYLEGLNALAMETGLALAASPPRSERLELEGLNHISMETLEGL

SEQ ID NO: 5 - DNA, 20 bp, Artificial Sequence
  PCR primer
tggaagccagagacaagcag

SEQ ID NO: 6 - DNA, 21 bp, Artificial Sequence
  PCR primer
agaaatggaagccagagacaa

SEQ ID NO: 7 - DNA, 22 bp, Artificial Sequence
  PCR primer
cttttgacaccttcctcgattc

SEQ ID NO: 8 - DNA, 21 bp, Artificial Sequence
  PCR primer
ctcaaaccacaggcctccgga

SEQ ID NO: 9 - DNA, 13908 bp, Mus musculus
aaaagagggtctgtgcaaaggcccaggagggagaaaaaaacaaacaaacaacaacaaaaaaaaacacatgctatggtttgaatggaaaaatatcccatgaaggcttatgtatttgagtcacttcttagctggtagcactcacttttgaaggctgtaaagccttcaatctgtgggtcctacccctttggcaaaccttgatctccaaagttacataagcacaggcacacacttccacttcctctgaggttttctaccaagaaaggatcaaccattcataaaatgttggtcctagtgaaccctgcacattgtagaggcttaaaaagtttaatttgggcctccaactcactacacaggaactccagcgggatccgcctgtccgttcatgctaacctttcaccgacatcttgtttttaagtttacagaaaacgttagggacctaaagaaggtcattacattacagtacattacagtacaacagaagttacaaagtagcaatgaggggcttggggatttagctcagtgctagagcgcttgcctagcaagtgcaagaccctaggttcggtcctcagctctgaaaaatcaaaacaaaacaaaacaaagtagcaatgataataattttatggttgaggggtcaccatgatatgaggaactgtattaaacggtcgctgcattagggaggatgaggaccactgtggggctcagctgaaggaagtgagttgctggtgtagggcaccggagtgctagatgtaaaccggtttcctgtctcccttctaaggctgactgcaccactaattcctgcctcccgtggagggtgctttccaggctccaagccttcctgccatgttggaatgtgtcctgtgaaccatgaaccgagatcaatctttcctcccttccatcacctctgccaggtggtttggtcatagtactcagtagagtaaggaggctggaagatttactacacctgacaaagaaaaattaatctgtatgatctcaaaaaaaaaaaaaaaaaaaacaccaccaccaacaacaaaaaaaccaacaaaaaaccaaaaccctttaggagtgcagaagcacaggcacacacttccacttcctctgaggttttctaccaagaaaggatcaaccattcataaaacgttggtcttagttatccctgcacattgtagaggcttaaaaagtttaacttgggcctccaactcactacacagaactccagagggatccgcctgtccgttcatgctaacctttcaccgacatcttgtttttaagtttacagaaaacgttagggacctaaagaaggtaagcatcctgctaagttactccctggctttacacaggctttctaaaacttgagtaagaggcatccttcccatcaaagattccaggaaaacagcctcccccctccgcggccacacatacgaatctatcgctgacaaagcccctgtaagctggcttatgtcctcccctcgcgttcaccattctgtaagtgcatagaattatttaagaggaaaaaaattactgtggataaaaattggttcggggccttggaattggccggtcgtgttgtgtttccttccagggccggcaggcggggcaccaggcaaggcttggaagccgcgcctctctcaacctctcctggccacccttgcccaacttccccatagacacagcttcaactaaaagtggccattgacctttcaagcttttgagcagtggggcaacagaacagtatttcaaagaaaaatggttatcgaaatttcgaatccggttttcccatgagtgttttttttttgttttgtttttctgttaaaaaaaaaaaaagtaggtcacattcaaagtgggtcacgtttcaggagccggcgtgcctggatgccggcgcggaggctaggtggcctcttacagagtgggaggtgagggtcccaataggaaagaagtactgggatcaatacgaactccgggtccctggctttgcaaggattcacagagacaaacgcaccaggcctgtgaccccgcaccccacccgggcacaggtaagggcacctcctctgtagggtggccagggtgggtctcccgaagggcaagcaggagttgagctgaggaggaaaggagaagctgggcaaggctgatgcaggggactaccagttggagctccaggggggagggattgagggcagtctgcgcagctttaaggaggcgctcagctcgtctctttcctggccttctaggatgctggcggaggggacagtctctggttcgcttcccgaggtgcccgggagtggtagtcgacctgggcagtggcgtgctagctctagctctgtgtgtgtcttagagagggagggacggacatctgagccccgcccccttcccgcacgctggtcctgcatcccacatggaggagaggagggtcgcgtctggcaggcgcacagcggggtggatggctggcctaaaggttccctcctacgtggagggctggggagaagaggggctgctattcgcgggaccgaggtgctcagctgttgcagacacaggggcaggtactggtggcttaataggcattggctggggacttctccttgttcccgagcaccccgaggtgcagggtcagaggagggcggagtcgcaggcttccaccccgcagccaccagcaccagcacccgcaccggctctctccacccggctcccttgaagcctgcgcattagcggccggggcctctttaaagcgctggcgggggctgcggtcacgtgaggcggattcctggaaagttcctggaaagcggcctccgccgcggccgggcggggcgcgaggggcgggaggcggggagcgagggaggcgcgtcgggctgggaagtcgcgcgcacactcggctccggggacagacggttaactcttgccaagtctcgccgcctctgcggctcccgggccttgggcttcccccctgaagcatgagcctttcctcccgcagccgccaacgctgcgcgggtctcggacagtgcgcgccgggactccaggcgcgcgccctcaagatcccttgtgcccggagcccggaagcttgcggcaggtaccgctcgcgaagcccgaaggttccgcccggggggacagtggccgggagggcggcggggtgcgagcacgggggcggcggcggaccgcctgggcgtccgcagtttagggcgccccgggagagttcaagtcggggctctgccccatccggactcaactgcctcctctctcccgggttccttctcggtctcgggaaattttccgagcacccccaccccccaacaactgctacccaaatttataatcctaataacctgatctcccgctcctccccgccagcctccgcccttgctcccccaccccaccccttctctttctcccatctcctccgcttcaactggagggaaacccggcactggcgagcaggggtgtcagcctggggcggagaggggggggggaagctaggcgacgatccctgggatttttgtctgcctttggcgcagaaaaactcggttgcttttactgagcgcagagccgattgcatccccaggcatctccttccacaaataaacgtcacccggggaactcagacggacacccctccttgccccctggctcccccgccccttgtccgctggggaggctgcctagtgcggaggcggcagtcgcggcggtggaggtaagacctcagtcccagttgatggcatggcccgctgcgctcgctgttgcgggctcagccccggcctcatttggagctccggcgggggctgcacgctccggccgattcctcgacagcgcccgcggcggcagccgcaggagccgcggtccgcgttttggagcgaccgccgctgagccccccatcctcgtctggagcgtgctccaggaagcggcaggagtgggggtgaggccgcctccgaggcagggatgcagcggctggcgcgccgctagcgcaccgcagcaccctcggctggcgacccaggagccctgcggcgctttagggcgtggaaccaggttttgccggatgcatcctcccaagggccctggggctgctcgaaatgtaagatggaaatgccaagtgcagagaactgcccggttctttgtgtaatgttttcccccccacccccaccccccacttgcccatgacaaaggcctatccatccggacccgcaggtgactgtttcctgggctgcctgtgtgtaattccagcacacagttcttcggcgggaaaacaccttgtttactctcatcctgtctccctcctcacccctctactccggccaactttagtgtcttggatctctgccctttttacccgtctttccccagagttgggcagggcgttagctggatgctcggggttaaatggtacagaacacgcaggcggaggagtccctgggattttccacgtgtctgtttacccacccccacctcggccgtaggggttcagcccagactgacccaatctctgttccattgtttcttcacaggcgatctgtgggtgacagtgtctgcgagagactttgccacaccattctgccggaatttggagaaaaagaaccagccgcttccagtcccctccccctccgccaccatttcggacaccctgcacactctcgttttggggtaccctgtgacttccaggcagcacgcgaggtccactggccccagctcgggcgaccagctgtctgggacgtgttgactcatctcccatgaccctgcggtgcctggagccctccgggaatggagcggacaggacgcggagccagtgggggaccgcggggttgccggaggaacagtcccccgaggcggcgcgtctggcgaaagccctgcgcgagctcagtcaaacaggtagggagctggcggctggcgaggagtgcgaaacggggcgtccccatccccaccctacccaaggcggtggcggagagcgcggctgggacgcgggcccaggttgggggcactgaaagcgatggaactactactcctcgcgtccggtctccgctcggggaaccgcagagagggatgcccggatcttaggtgaccacaaaagcaaagtggagggacgctgaggcttgggcaagggccgggagcgagctgggctcattttggaaatgttcccccagcaccttggagcctaggctgctttcagccggagctcccgctcgctccggcgtgggagaaaagcggccagcgcctctcttaactggcccggtgcgcgggcggccagtgggctgtgctgcctcctgtctgggctgtgagcgctcccgagagcacagccgcctctgccgcagcccgggttgatggcagccaagttcagactgtatgaatcgcagctgctgggggtggggggtagcctgggccgagtgcagcctgctccccgcaatgcggaaagcaccctacatctgaaagcaaagaagagaaatttatattttctcccaatagctcgaaaacaatttgagtcttaaaaaatctggcttctgaaaacttacctttgaggcaagacaacttttgtagcagtagatcttgggagaggagaaaaagttccagtctttcctttcggccctgggctttccttgggaaagtttcccggtaatatttttttgttgcggggggggggggtggcgagaggggagctgtcggctgaaacggaggggggcacattgttcaaagttattaaacgaagtatcttgagttacttttgtaagtgaggtttagaatctggtcaagatgaatcaaatggagatttcagagagcaggggttattttgatccagggcaaagtccaaaagagtatagtgaagactgtaaactgtttctgctcttcctgggaaactgagctagttgtaatcaaagcagtcaacaggagtgcctcctagggcttctaacggaggctaaatgttacaagttctttgggggtaggttagagggctaccagccagtcaaaaaaaagttgcttctgtttttaatggaattatcggagataagctttccactttgtcccctaacttctaatttagttctgatttacttaggtttttgtttcagttaaactgtactgaaaggtttttttttttttttttttctttgtcagccaatatgtctgtcatattgcaaaagttcttttagctcattaggagaaaaccttaacataatttaaagaaaagctacagaaaatcatttgaaaagaaaaaaattgctttacagttgtgcctagaatggacttaagtttttattaaatacttacccagagatttgtggtaggccttggtaaactttaactcacaggctttaaaaaaaaaaaaaaaaggtgtaacaagagaaattagttgagcactgtggtacaggtttataaatcccaagacttgggaggtgagtgaagaagaacaagaaggttcaaggttatccttggctacaaagtaaaattgaggccagcctgggctacaggctgccctgtctcaaacaagcaaccgactagaaaaacgactgccaagtacagaccatactctaaaaattcttaataataactatttcactttctcttctttttcttttttgaatgaaaaaccccaggatggtactggggaagtatgactgttaatgaagccaaagagaaattaaaagaggctccagaaggaactttcttgattagagatagttcgcattcagactacctactaactatatccgttaagacgtcagctggaccgactaacctgcggattgagtaccaagatgggaaattcagattggattctatcatatgtgtcaagtccaagcttaaacagtttgacagtgtggttcatctgattgactactatgtccagatgtgcaaggataaacggacaggcccagaagccccacggaatgggactgttcacctgtacctgaccaaacctctgtatacatcagcacccactctgcagcatttctgtcgactcgccattaacaaatgtaccggtacgatctggggactgcctttaccaacaagactaaaagattacttggaagaatataaattccaggtataagtatttctctctctttttcgtttttttttaaaaaaaaaaaaaacacatgcctcatatagactatctccgaatgcagctatgtgaaagagaacccagaggccctcctctggataactgcgcagaattctctcttaaggacagttgggctcagtctaacttaaaggtgtgaagatgtagctaggtattttaaagttccccttaggtagttttagctgaatgatgctttctttcctatggctgctcaagatcaaatggcccttttaaatgaaacaaacaaaacaaaacaaaacaaaacaaaaacaaaatgtcccaaggaaaggcaagagaatattcctgtcagaatgacttgcctttgttttttgggttcctatgcactgggtcaaaagtccaagctccataggagagaaagaaaggcttccatttccaggaggacagctgaaggagggaaagaccctggctgacccaggcttcagctccacttctagacgcctggggttcagtctgtgttagaacctgttatagtttgcatcctgatgtatctagtaggagttccgttaagctgaccatgcttgtatttatccctcgtcttatgcaactaatcaaatcaaccaaaaaaaggaaaaaaaaaaaaaaaaaagaaacgaaaaaagaaccatcaccatgagatcctgtatttgtctttttttactacacgtatgacctcccccgtgagtgagtactgtagtcctccatctcaaggcagccttacttcagacacatttcaaactggtgcaaacagaaaagacttctctcttttcttctgaggctaaagacaagaatgtcacgctatacaggtgcaactcaatccttgaaaacagaaaccaatgcagacagagacattttaccccttgatgtagctgtgagtcccaacctagtgccattgtttttatttttatttttatttttggaaatggctttagaactttccaagttatccttgaattgtctgaccacggacatcaacagctgcctcccttctaccatgtagaatcctatgacttaacttttcttccagatatagaggggtacctgcctgtttttcaaagtgtttatttactgctgttactatttgattagaatgtatcaaataaaaacaaacctgacttttacaagttgcactcattactttgagttgtaggtgtacatttccatgctaataaaaggtcgccataaaaactcattatcaagtgaaataaactaagcaatcagctcagggtagaacattaactcgcttgcctccaaataaggcccacacctgctctatgtgttttagaaagcatggttcacaggctaggaatcgtcaagacagcctgatcatgtgcaggccggatgggcacaatccttgtgcatttcaaaagcaatggtttagaagcgataaaagttacgtcagggtctaaactctaacaagttccgcagccgctttctcttggccacccagtctcacgactgctgtagcatgccatcttctctagagtctagacactatgcctcttgccgccctgtacatgtttcctggccgggccgtaggttcctgtgtgtccagggtgaaaggagaacctggggcgtcatgtgcacgctctaagtgaataggaaattataaaagtgcagaataatagaactgacttaccttgcagggtttgaagtccccagttttacaccaggaaggaaacattaagtttatccaacctggatggattgctgggtgtggcttgggaagagcctgcttcgctctgctgggtggtggggcaatactaggcttcccgctaggatacttagatctcccttttgcacactgatgatgatggttctctggtagaacgcttgggctagcaaggggctttgtggaatccttttcaggtctccctgctgttcctcaggtattgggagtgaggaggcagtcagaagaccctgtgcctgtggagttatgacaagctcccgagtgttgcgttcagcgcctgcaggtgtgtgtgtattgggagcccagattcactgcttggggctgtgatatggatcaccttatctaactctagtcctgatggcaaggaagttgataggcatcaggggacagttttgttttgtttttgttttcttgctttatagtttttaatatatttactgagttccttgtgtgccagcctctgactcaatacttcataatatctcatttgatcctcggaaggaccaaaagagcaaagtccaggatttatgggaagtgaatagttccacactgatccagttaacaagttagagcaggctgtaatagcagtctttttgctgcggcctcaaccagactagtgcagatactgtaattagtgttgcgtcctctctcgctttaaaaacattttcaagaagtggtttcttggtgcatgtgtgtatgtgtatgcatgtgccatgtcatatatgtgggaggtgtggcacagcttctccgttcttgcctctcgctgcgtgggctccagggattggacctcagtctttaccgacaagcacccttacccattgagacatcttgtcagccctccagtcagtctggccaatggcttttttttttttgaagatccctgaaataagtggtaaagtgggggtggggagggagtttgtccccttcctgggtgactactaaatgatgccaggtatcactgactgtcccatctaacaacagaaacaaaactggattcacccaaggtgtcctcaacagaggctggaaaatttctctttcactgttgtttttctatggggggtggtgtgaagcattagtaaggacatttattattgagattctaattgttgctgttcttgtggcctgtcctgtgctctgtcgcaggatttgtgtatccacccccgacttcagtgactgctatgagtttctgttcagaggacgcagaggtgaaggagcgtatgtcatcccatctaaagttaccaacacagataacagatgtaatgacatctgctttctttttagaaacagggacccccagtttgtgtgcgcttggaggtcttgcttagtgttattagtatgaaggttttgacttcatcgtaattacatcattcaaataggtgacagaaagggactgttggttgttccacacggtttattttcttgggaagcctttctttcccctgcttttagaaaattgtaccctgcttggcggagggtaggagacagacacgtcatcaagtaatccaagggatggaatgtcccgagagcagactatgcccttctggttgtgggtttgggcacagggcaggagggggctgtggctctaacagctgggccgaagcctcactggctcccagaagtcctgtccatcttctagacctctacccagaatgtggctctgggcctgtcattccctcagaggctctgcgttctcctcatccagttgttaactccctagaatcctggagtccggaacacactgtttgggtcactcagcccaggtcctttataggaaccagaacatttcagattcagggactagaaatctagtcagcaaatgggcaacatacaaacccagagcttaggtccggtggaagctccacccttctgccctcccttcaaaccgcctgtgcccttctttgctgcagttactgtaacttaaaacttgcttcctctgacatgcaaatcaggttttgggatgtcaccacagcaggatactttcaattcttagctcctgccccactctccaggattaccccttttgtcgtgatccactgtataatgagatatgtattaatttgaattctttagttctttttttaatcattttggagattgaacgtaggtctttccccacgcttggcaagcatcctaccgttgagccacatctccagtccatgtcaatgtctctctaatctgtttgctgtttgaaagccgaagtcctccggtccttgctgtgtggtgatctcatgacacgtctgccagatgtcacccacacatggccagggtgcccagctgactctactctcctgtgtttgcttaccagtagagtctgttttggcttttgcctcctcttacatgcaggtagctcctgccttactctctcctgctcttcccacgatgctgtctttttagatggtcgattagagaagtcctgggtggctgtatgatgggccagcgaaggatgggaattcaagtctacttgaattaggtaaactgacagatttagggtccttaggattaagtctgtgtctgtttctctttagttctcttcaggatttaaaaaccaaagccagttcctaacaccacatttcaacactttaaaaaaaaaaaaaaaaaaaaaacttgtttatttaaacaaccgtaggctccttacttgctagtttatgctctattgggaaggaagaaagacagcccttctttagcttgtttgttgctgagggcaatccttgcaccttcggtttggtcttctcattctcttctgctgccctggaagattttctccagttttccctctatgtggtttcagagtaagtcaccttacctcgcactcagcttaagggacagctgttgttggagtcagcctctaaaagccccgtttgtcccaaatgcctgactagcgggtcagctgaagcagtcattgtggtcttcctacccaccctgtcctcagctctgtccacaagggaggtctgagctgccaagtctgacgggggactcacttccataaacatttactgagccataaaaataaaactgcttttatagacaactctcactttgaactccattcttcacttggagaagaaggcgctgcccctcgagcaggagcagtttgtgacgggttatacagcccgtctgtggcctcatctcagtgaggaacagagggaagggagactcaagccagagagagccttggtgcgagctaagaaaataacaccagctgccttcctcttctgtttcagcctaagttccttccagagagccccttcgctgcggcgaaataagacacatttgctagttaaatcatcacaggacttcatatatttttcctagactgtcccagtttccagtcatgttaagataaaaagatagcctttttgccaaatggtttttcccttctgttctttgggcagcccttttcctgttcagattttgatcttgtgttgctatgatctttcttagtctttcaggaaaaccctccccatgttgttttctgcccagggaagttgttttcccactttgactttcgtcacccagatgaactgatgaactgcgttcccttaggtagtagacggaatcgtgggtttggtcagaaagtaagtgtgttcttgttttgtgtattttatttacctacctgttctccattatgtggtgataaagggcggagagagtgcctgctgtcagacaaccctctgcttcctctccgttcattctcactggaaccactgtcagaaaaatggcttcatgtcattattatttaagtatattgaaggcagtaatagggttgggcaaagaaaaaggggtgaagcctcactggtgtgatgaggggctcttccgagtctctcattaggtacccagggctctcaagactatgaccagtttatttctatcaccctgtgtaccaatccttgctcttgagctggggtaggattgaacagctttagcggaaaaaaaaattcttcttctaagacagggccttaggtatcctagactcgaattggaactcgatgtagagctaagggttatcctgaactcctgaccctcctgcctccgtctttcagctgctgggattacaggtatgtgcctgcctgtatcaagcctgttaatgcagtgaagccagggcttcctgggctccaggcaagttcttgaccaagtgagctactttcccggaaactggcaatcattgtcttcaaaattgtgttcctcttttatattggggagtgttaccttttcctggtggaccgggcgctttctgattcagcatctttttctcatccgttacagtgttatctgtagagtttagagttgcagagaatggatatccttcaagtctttatttttttttaatgatatattttatgtatgtgtgcatgtaatgtgtatgtacacacacacacacacacacacacacacacacacacacacacattcatgtagatacccagaaaagaccagaagaagatgtcagattatggttctgagctgctatgtgggagttgggaattgaattccggtcctctggaagagcagtaaatgctcctggtgtcagagccatctctcctgtccccatccacaagtcttgggaccaaggcctaataaatcaaggtgttaaccttctatttatattcatttggtacctgttatattattcattaggaactcagggaagagtcacactctcacattatagaggccctcttaccttatgggaagagatagagaagacaggattcatatttattcaatagtctggtctgtctcatgccccattggttaatctccacaacagccaggagcattacagactccttttattgaaaataaaacagatgcttgaagatggaaactgtagcgcccagcaatactgccctacgactaggagtctgtacctgtatggagactatggaacacacgcagggttatagctatgagtgacaccatgctctcctctcctcttagtctgataaagcattccttacatgagagaactggcttaggcttgtgctgtgtactgtccttctggactccctgggtggtaggacttagaggtgaagagtgagagatgtgtggcgggcaggcaggaagcaggtgcctgggagaggagtggagaggcagacaagatgttcaagtttgtcaccgggctcagatttgtcccagatttgttccagattaatttggagctctgggtctg

SEQ ID NO: 10 - DNA, 133 bp, Artificial Sequence
  probe
tgtctgcgagagactttgccacaccattctgccggaatttggagaaaaagaaccagccttccagtcccctccccctccgccaccatttcggacaccctgcacactctcgttttgggaccctgtgacttccagg

SEQ ID NO: 11 - DNA, 167 bp, Artificial Sequence
  Probe
cgccattaacaaatgtaccggtacgatctggggactgcctttaccaacaagactaaaattacttggaagaatataaattccaggtataagtatttctctctctttttcgtttttttaaaaaaaaaaaaaacacatgcctcatatagactatctccgaatgcagctat

SEQ ID NO: 12 - DNA, 596 bp, Artificial Sequence
  Probe
attcaagtctacttgaattaggtaaactgacagatttagggtccttaggattaagtcgtctgtttctctttagttctcttcaggatttaaaaaccaaagccagttcctaacacctttcaacactttaaaaaaaaaaaaaaaaaaaaaacttgtttatttaaacaaccgtagccttacttgctagtttatgctctattgggaaggaagaaagacagcccttctttagctttgttgctgagggcaatccttgcaccttcggtttggtcttctcattctcttctgctgtggaagattttctccagttttccctctatgtggtttcagagtaagtcaccttacctcctcagcttaagggacagctgttgttggagtcagcctctaaaagccccgtttgtcccagcctgactagcgggtcagctgaagcagtcattgtggtcttcctacccaccctgtcctctctgtccacaagggaggtctgagctgccaagtctgacgggggactcacttccataatttactgagccataaaaataaaactgcttttatagacaactctcactttgaactccattcacttggagaagaaggcgctgccc

SEQ ID NO: 13 - DNA, 20 bp, Artificial Sequence
  PCR primer
ctgggctcattttggaaatg

SEQ ID NO: 14 - DNA, 20 bp, Artificial Sequence
  PCR primer
tattttctcccaatagctcg

SEQ ID NO: 15 - DNA, 20 bp, Artificial Sequence
  PCR primer
ctggcttctgaaaacttacc

SEQ ID NO: 16 - DNA, 20 bp, Artificial Sequence
  PCR primer
gtagatcttgggagaggaga

SEQ ID NO: 17 - DNA, 21 bp, Artificial Sequence
  PCR primer
tgggctttccttgggaaagtt

SEQ ID NO: 18 - DNA, 20 bp, Artificial Sequence
  PCR primer
agctgtcggctgaaacggag

SEQ ID NO: 19 - DNA, 20 bp, Artificial Sequence
  PCR primer
aacgaagtatcttgagttac

SEQ ID NO: 20 - DNA, 659158 bp, Mus musculus
  misc_feature (123459)..(123478): n is unidentified a, c, g, or t
  misc_feature (602466)..(602485): n is unidentified a, c, g, or t
  misc_feature (546998)..(547017): n is unidentified a, c, g, or t
  misc_feature (494715)..(494814): n is unidentified a, c, g, or t
  misc_feature (390986)..(391005): n is unidentified a, c, g, or t
  misc_feature (346860)..(346823): n is unidentified a, c, g, or t
  misc_feature (317174)..(317193): n is unidentified a, c, g, or t
  misc_feature (280353)..(280373): n is unidentified a, c, g, or t
  misc_feature (271829)..(271848): n is unidentified a, c, g, or t
  misc_feature (183872)..(183891): n is unidentified a, c, g, or t
  misc_feature (170625)..(170645): n is unidentified a, c, g, or t
  misc_feature (132680)..(132700): n is unidentified a, c, g, or t
  misc_feature: n is a, c, g, or t
cttgatggagtcggttggggttttttgtttgtttgtttgtttgttttctggaaagttgataaacttaatgaggacatggcttgcagcgtggcaggcacaacacctgatgctaaggtcctgactaattcattgctcagaggtatttattccagtaacaggagccaattccacgtgcgcagttgtttacagcactgtgctatcacagaggcgcatgcgcagtttggagggaagtgtccggttgctgtttccttgctgtgtattggctggggtaagcaccatggctttcaggtctgttaagagtgacccaagcgcatgagcattggagacagcagtgcccgagctgtgtcagtgttgaaaccagactacaacgcaggagaaaggactctgaagtcgacattcgctctagctgtcaagatgataaaaaaataagacaatagatgttggtaaactgtcagctgaagaagtagaaatggccaccctaaggagagaatggaatggccgtgagcatggtcctcaggcaaaggaagtggaacagttgaccaaaaaccaagaagaggtagaagggaaatctcagcaggagaaggagagggaatggaaaggagaaatagacaaaatcgtggattttataactcccgagaggcaccaattctgttagaagccgtcctggcctttcactccggaaaggttttcttgttttttcttttttaagttgcccatcagggaattaggccattaatactgaatcggatccttgtctgtccagttgggtgctttattgtaatgatggacatctttataaacatcttaatcttaatacataactttttggaataaaacttagactgacaaaaacagaatagtgaacaaaagagaagaaggttagcaataattgacagtaatgtgaacctcttgcccaatgggagcacttaggttctctctcttttttttattgcatcaaagaaagtaagtctgatacaagcttgtcagatataccaactttgctcctaactttaaaacactattagtctttttcaaatttataccgaacaaagctatttatttgacggacaagttgtatattgacttatctgaacaagctatttctattgaaaaaaattatattgacttataataaaagttttacaagatcaagataagttatgagcatgaaagaacaaggcttgtaagtaaaattaaataattaaaaagtgtttctgtgagtccagagttgaccaatgtggaactctagaaggccaaacgcagtcctgtgtgagtactttagcaaattagactttaatgtattgaaaatatagattaatgtagttcctgaattatgtctttttttgtttgtttgtttgtttttgtttttttttttcgagacagggtttctctgtgtagccctggctatcctggaactcactctgtagaccaggttggccttgaactcagaaatccgtctgcctctgtctcctgtgtgctgggattaaaggcgtgcgccaccacgcccggctccgaattatgtctttcatgtgttgctgattttgagttttctaaacaaatagtaacccatcacagtcttacttcctctgtatcttcctatctcttccatggctgagacaaaactattaccttcctcactacccttctatgaaaaaccacttacaggttttagtggccatttacaattacatgtgagggatgctactttaaaagcagccctaggaagagccggagaggctgtgttgccttaacctgcggaacacattctcgacgaaaccgccagagggcactgtgacacagcattcagcctgaaccgcttaccctgtggttgtgactttgaaatgccagaatggcagagaatttgaacattgctacttgagaaagggtggtttgataatgtcattgccggaagtcgttctactcgtctatcattaagtatttatacaacagctggttgtgagaagatctgctttctagctggccaactcaaacatccttaagatcagtgctacttgctaaatatcggccgtgctacttatatttttctaatgacattcccaactgtggatgtttttcactatcattttttttaattaagtttaggtagaaaaccttgacttactcaaagataacattgttaactgtttttgtactttcatatataaaaataaatcttttatgtatatttaaagacatcagatttctttttgttagaaaatatgtttttttttaaagatttttcttttaatgtgtatggatgctttcgttgcaggtgtgtcttagtaacatgtgggtgtctggtgcccttgtatctcctgggactgtagttacagacagctgggaactgactgacatgtggtgctgggaattgaactcaggtcccctgggagagcagccagtgctcttgactactgagccatctctccagcccttgtactttctttttgtttttaattttaaatggtgtgtgttgtttgtctctcgtctctccacatgtgtctgtctgtgtatatgttgtctgtctgtctgtctctccgtgtgtgtgtgtgtgtgtgtgtgtgtgtgtgtgtgtgtgtgtgttctgttggggactgatctcagggctttctttatacatgtcaggcaagcactgtgcctctgaattgcctcctcacaagggctaagggttttgtgactccttcttttggtcccacaaactcctgccttcctaagaagctaacaactctagtcccagtcagcagaggtaagagaacccattagttaagactcttgatttccagggccaagaagcccatccatccacagtagagtccagcaatgggagtctgttggaggaggatcacaggactgtaggaaagtgaagctggaccatggggagacgtcagctgaggacttggttcctgccagtaggcttgcttttcatcttttgtggttgttgttgttgtaaacatttattcaatgtatgaagagggtgttcaattctctctttctaccacatgggatctggatattgaacttggccggcttgacggcaatctcttatacctcctgaagtgtttggtagttccccgactcctggtctgtgtgtgtatgtgtgtgtgtgtgttcatgcataccctggtgtggtgtgaaagacagaagacaaacttggggagttaagtttcaaggcctgaactcaggtcatcaggcttatacagcaagcacttttacccatcaaccagttgacgtgcccattgttaagctgcttgcctcctcctcctccccctcccccttcctcctcgttttcttgttgttgtcgtcgtcatcgtcctcgttgtttttgagatgaggtctcatagctctagcaggcctagaacttactgtgtaggccaggctggcctctgtttcccgagtgctgagtttgaaggcatgtgccaccatgcagggcggttaggcatcttctagtgtggtcatttgatgaatgtctgtctctcctactaagctgtaaccttcacaactgggattgatgaccttattaagttatgtgtcttgcatggctcctagtgctggcactgcctggcctttttaccatccccacatagttttgtaaaagcaaactgccttggcatgaaggattttaagtaaggagtccctgtgggactcaggatagaaatgtagccacagaactcctgagactgaaggattttgagacagtttatttgtgtgttttcttgaacatagaaactgcagttttaaagctgcttattagagtattttatatctctcctcaactttacctgcctgcagctaatcacttagtaacattaaagctgaaaaaatattcaaatacaagacagcttccatatgttctaggagacatctttatctttaattccaactatatttttatttgtgtgtgtgtttgtgtgtgtatgtgtgtgtgtgtgtgtgtgtgtgtgtgtgtgtacatagttcccatggaagtcagaagtgagcaccagattccctggagctgcagtgccagaaagcaagccatgcaggagttgaacttgggttctatggaagagcagcaggtgctcttactgagcaatctctccaaccctaattataaatacttttaagaaaagagctgggcagtgttgacacaggcctttagttccagcatttgggagggagaggcaggtggatctcttgagttcaaggccagcctggtctatagagcaagccccaggaaacagagaaacattgtctcaaaaacaaccaaccaaccaagaacagccagcttgccagcagttattgcttatgttcttcatgaaagccattctgacttggaccacatgaaatcacaatgtaggaatatttgtttgtttttgagacaggatctctcatagtgtctgtcggtctccacccccaagtgctgggatgaaggtgggggaccttggtctggcccgtcttccccaccgagccgtgggggtggagcatgaatatacacattgggatgcttcagtgtactttttgatttgcattttcttgatggttaagaatgccaaacattttttcatgtgtttattgccccccctttaaaaatttgatcagtatctcttttgttcatctgcctaccagttggttggattactcattcttttactgttctttatatattctagatattagctccttatcagatgaatacgattccttttttcttattttgtagactgtggctttttctattgatcgttttcttttgctgcgtggaggcattttaatctagtgccgtttatcagttcttcatcttatttcctctgctattggggtctcattgagagggccgggccggtgaaattgctcagcgggttaaggcacttacagctcaaacctggcaaaccaactgtgcttcccagaacccacatagaggtggaaggagagaatctattccacggagagagctattgtctgcgctgctgtctgcatgaccctgttttccctctagtgatataaactcttataatacaagtctctgttcttcactccattactaggcggtcttattataaagtgtttacttccttgggatgaaagcagtgtttctatggcttgtaattcttacacttgatcctatccctaaaatcacaaaataaatggactccatttcacaggcgacagctctttagatactcaaaagcatttgtcagatctcattattattcaccccccccccattatccgtatggcatgttctccaaacctccccaattttggttgcccctccccctttgagctatacattcattcatccttttaatagcatctctctgagaatgtgttacccagaactgagcgcagttttcttgctcaggatgctttcattgtgctaatggtgccagtaacacattaaggtttttagttttttttgttttttgttttttttaagtagtcgtgccatccagcaggttctcactgagtcataataccctaagagggggtcagaataccaaaagaggctctaaatttggatgattttttaatgcaaatatactttctgctcttcttgattcctcgctgggaagagagaacatttatttgcattgctaaccgcactggtttttatttttgccgtgtaatgttagcacacagctgtcgatacccaccaaggaagaattttagcaggggatgacgcatttagaaacctcattcttgctaaagggtggatagggaaggacagattggaataggaacaagatggaatgtcagagacaccattacgtgacgtagtgatgaggatgacagctgacaatggttggggttaggaaaacagcagaaaggataggaggagaggctggatttcagagagacagacatagtcatgtgagcaggacttgaccactaatccgtacaggaatgaacatgagtgatgacggatgagacggggtgaggcatacactcacacacacagttacacactcacacactcatgtacactcacatactcacaatcacatacacccacactcacacattcatatacatatacactcatacacacactcagttacacactcacactcagttacacccactcacatacaatacaatcacatacactcacacagttacacactcacacacacacatacaatcacatatactcacacacttacacactcatatatactcacacacatccatacaatcacatacactcacacaagttacacactcatacacatatttacaatcacatacactcacacacacagttacacactcatacatactcacacaagttatacaatcacatacatacaatcacatacaatcatatacactcacgcacagttatacactcatacaatcacataactcacagtcacatacatactcacatacccccatgcgcacacacacacacacacacacacacacacacacacacacacaccacagctcttgacatccagatgacccagctttggcagtgaggcctgtgttttcctgttgggtatatgatcttacagcatctgggcaatgtccttggggcctgtatgaaatgagacacccaatgttcacttcacgattcacctagcatagttaagaatagaattattgtgccaaccacaagatgactaacatccctctctcaggaaaaacgatcactggctacagctttacccttgctttggtttgccctccttggagaaccaaggtttcttaggattctcagtcatgaaatacccctgctctctgactatattcagtctagagctatgcctgcttccttaaatgctgtacactgtaccagcctaatcccaaatgctgtaacagatttcctcacattcttctgagatacctcaaggttgcccatgctgactgttctttttcattgtgttgagtgataaactcatcttatttagctccacatgtgttcctggtagtcagtggttgaagaatatggacataaggattatttcctgctagtgagaaggctgtatagaattatcatctaggaataacagaataaaagggtagctcatcatcaatgtagagctattgcttttctcaaataaggttaatttgtttacattgatatggattattgtatattgatacaggtttaaggttgtcattggtataaatctttgtatgttgatacaagcccccgattaaatgtctccttttataaggtgcctaagtcatgatgtttcttcagagcaatcgagcagtaactgagacattatgttagtaaccacgtagggcaaatgttccattctgggggtcttggtgaaaacaattttagccagcgtttagctatgttgagaagatggctagtgggcatcgcagcccatcgtgaatttttgggttaaatggagaagcagtgcaggggccagtcttcgtcagactggactctagcctcagttctgcttctgcaaaggtggcctgagtgggtccttatcggtcggaggatgatatcatcgcagtgtgatctttctgtgagacgttgctattcttgggatggaaggtgggagaaggggtaggggaactttcaattaccttgtcagggtgggagtcagggcagtccaaggctgatagggagatgcccagtcactaatgcccctgctagagcaggaggcaatcatagtcagttgtgggtaatctgatccatccccaatctccatatttttcagctcatttgtttcttttctttttaaaatctggagataagatgtagctgtcccttgctactttgtgacttctttctcccactcttttctagccttctccacacttccaaccccctaacactagaaaagaaaggacaggaggaaatgggacatgtcgttagacttcccttgggacagtttgatctttgtcactgttgggatatctaatttcttctttcttctttgtgcatgactacataacaagccacaaccaacaccaaaaattcaaaaaaccaacaacccaccctgcctctcagggctctagcatttatgtacccctgaaaagtccccaggattccaacacatacacacttgcagaaactatctgcctctgataaaatcatgcccctgctagaacacgaggcaactcatagtcagttgttgtgggtaatctgacacatctccatttccacataactaggattaaaaaaatttttttcttataatatttctgtttttttttttaaagaaaccaaaattccaaaattgttactacatagggtttctctgtgtagtgctggctgtcctagagctagctctatgaagcagctgtccttgaactaaaagagatccacctgcctctgtctccatagtgctgggattaaagacatgcctcaccactgccgactctgtgtgtgtgtgtgtgtgtgtgtgtgtgtgtgtgtgtgtgtgtgtgtgtgtgtgattcagttttaagatgaaggctgattcaaaatgaatgtcaaggcccagatgccaggctaaccctctgctcttagttagtttgtgggcccagggaagaagtgatactttctagcaaacacagtctctaagtaacagcttccatgccaatacactcaccaatagaggttgaggggtttcaaatgacaagggaagctgggaagagccaagattgctgaagaagaaatagaaaaagaaacgagaaggctgaaatcagagcctcaagaaagagcccatatatttacaagacagggaagatgtcctagcaggaggtgtctgaggactcagaataaaggtgatggccagaagttgaaggactgagcttctagacgggagtggggtgggaggggggggggatataggctggatggtttgagacccaagtggaagtcaggcaagacgaggctcccctgcagctgtctggcatgtcatcacttttgcgcatcctttcatcctgctgcacgataagctgtggagacaagctgccagccctagctctggaatctgcctttttgttaaggagtcctgcttcttttcaggggaaaacagctcttagaaaagaggatcagcttccctattttcttttaaagaagaatcttccctgtttttttttttttttgttttttttttttgtttgtttttgttttttttaagctgtgattatagctgggtgtaatgcagcatgctattgatccccagctcttgggaggcagaggcaggcagatctctgtgagttcctggtctacatagtggtctgcatagtgagttccaggacagccagacctgtcttttttttttttttttttttttaaagcactgtggtttatccaatcagaaaggtaaggaaggggagaacgaaaatgtatgaaaatgtaagtaacctagataaaagtgagcaagtaagcaagggctgggtatagggctcagtgagtggagggcttgcctcaaaagcctggaggcctgagtttgatgctgaacatcacataagccaaatatggtgatctgggaagaagaaggatcagcagttcaaggccattcttagctacatagcaagatcaaagccagccacgttgtttggtcctgttatcgttgttgttgtcatcgtcgtcatcttcttcttcttcttcttcttcttcttcttcttcttcttctccctcttcttctccctcttcttctccctcttcttctccctcttcttctccctcttcttctccctcttcttctccctcttcttctccctctccctctcctccttctccccctcctccccctccccctctccaggtaaaacagagatcagactaagaggtgaagctcagttttagtttactctctgagtctcagaggaccaaagggaacccccgaggcctcaggggcagggagagcttgttttttaaagaatatagccacctgggaaacatttgggcatctgcctgtgctaaggatttaccctggcctctgagctctcctaatgcaataactttattaataaaaacatctgtgctgactttgatattgatacatcaatgtcgagtagcaaacttgaggtttgatgtgaacatctctaattctaaggacccagtttttcaaccttcattcttttaggaaaggcccacttcccctgcatccatgtctagaggatctctacctcctagcatggttggttaggctgaagttgccacggcatacagccgatccgagcaaagtccagtgtcttttttttccccattagtttgtttacttattcactttacatcctaatcacagccccccaactcctagccccccatagcttcttccactaaccccctccccttatcctctgagaattagggagactcccctgggtgccaaccgacccacggtctaatgtcctaatgctgagcgtgtaacctgggcaatgagagcccttcttcaggtttttgaaaagacagctgggccactgggcttcttttctctctgagacagacgggggagataggtcagcagatttactcgcggtacaagtcctcagaagaaagcaggtgtaacagaagcagatgaaaagagattttggggctagggagagggctcagtgggtgaagtgcttgtcacacaaggatgaggacctgaagtcaagtccccagaaccaatgtaaaactggactcagagccgggcgtggtggcgcacgcctttaatcccagcactcgggaggcagaggcaggtggatctctgagttcgaggccagcctggtttacaaagtgagctccagggcagtcagggctatacagagaaaccctgtctcgaaaaaaaaaaaaaaaaaacaaacaaacaaacaaaaaaactggactcagtaatctagtcatctctagcgctagcgctccttcagccagataggaggtgtggaccagagaaaccctgaagtccccgacctgctatgcagcagcagaaaaagtcaacaaaggaccctggtctctaagatgtggaaggtgagaaccaacacccgaggctgtcctctgacccgcacacactgcacgctgctgcatgcacacgtgcgcacgtgtgtgcgcaggcgctctctctctctctctctctctctctcacacacacacacacacacacacacacacacacacacacacactcacgcacgcacgcacgcactcatgcactcatgcacgctcgcacttgagtgcgaacacacacgcacgagagagagagagagagagagagagagagagagagagagagagaagggtggggtgagagagagagagaggtggggtgagagaagattccagatggcttctttttctttttttgtctgtaggtcaccaagtctccccaccggcactcccttttgcctaagctggtttgactcgggtttctgttacattttttctttccaagagagaaatctcactcttgcggtggcttcttttaaggctggctttaatttacacggtcaaaagctaattttgtttttattgttaaaagttaacttaattttcgtaagtgtccccaacatctcattcaaaatggcatagaacaaagtgaccacaaatgacttgcctttcgcctagtaaaagcagcagatgttcaaaatgactcgtgctttatatgtaatactgggctacatctatccaaggcaggccccaagcatcctttattttttatttatttacttatttttatatagacaactctagtctaaagcagtggctgtggccccttaatatagttcttcatgttgcagtgacccccccaaccataagattatttttgttgttacttcataattacagttttgttattgttatgaatcataatgtaaatatctgatatgcagggtatctggtatgtggaacccctgtgaaccactcaattgacacctgcccccaagggggtcagaactaaagggctgaaaaccacttgtttaaatcacggtttgattccttatctccctacccctccgttcacgttcacggcatttgaacactttcttctgtaaacaagaaaggcatctctggtaagagaaagaatgtgtttcaccctttccatttttttttctctgtttgtcctatataaagttccaagcgcctcttcaagttcacgctttgtctaagcacgactgatctccacaggtctgcctgtccctgttgattttcctcacgccaaactctttgggctgaaaggaaacctgatctttgtgtttacccagatacaccctgttttcaaggacagctgtccgagatgactaatagtctgggttcttagaagagaaccccaggtctgctgcactgtttatgacaacagcgtagtttttcttagcctactccttcttagagaacaaacttcctgcttcctcctggggaaatctccttccttaaccagaagtttcctaggtccctgcaatactctaaactcttacatcaggagcaggagtcatggcctggtctcaaggacctccacacgtgtgtctctgcagggaccacatgacttaaactaatgcaatggcaacaggcaagtttactatttctgctggctgtgaacttgaggatttgttagggctggcatttatgcagccatttatggccacaaggggacaaatgaccttcacaagaacagagaaaccaagtcctgaatatttggctagaatattattattatttaagaatgtatttatttcatttatatgagtacactgtagctgtcttcctatggggcatcagatcccattacagatggttgtgagccaccatgtggttgctgggaattgaacccaggacctgtagaagagcaagcagtaagtgttcttacctctgagccatcactccagccctagaatattattattattatcattattattttgaaatacatttaaatgtatctttgtgttacaaccaaaagatccttagctgatgtcaaaaagaccatgggcaatcaattgcataagaggaaaatttgatatattgtggtttcctttttgaaagaacaagctcttagaggcaaataaaaacttgaaatcttttggactagccaaccaggagtgatgtgcgtgccaaggtgtccatctataaaagagagtaatgtgtaagaaacaaggctggagcttcccccctcccccctatgtgtgccaaggtgtccatctataaaagagagtaatgtgtaagaaacacggctggagccttccccctcctccctaaaaatccaataagttgttgggatggcaacaatctgagagatttaacccagtcggctactacgatctctatggcaacaatccattacaatgagacagctgtcctgattagtgactctgagacaccaggaaaatcctctgaaaagctgtaataggcctttccagaggagcagaaccgatagcatgtatatccaactgtaacgggattcattagggtgctgacatgaccaagaggctcaacggtcccaccatggccagcctttgaatgaatgaaacaactaatgaaacacctctgtaacgagccctaaaagcctccagatgactggttctcaacctgtgggtctcgacccctttggagggtcacgcactagatgtcctgcatatcagatgcatttacattacgattcacagcagtagcaagattacggttgtgaagtaggaataggagtaattttatagttgggggggtcactacagcatgaggggctgtactgaaggggtaccacattaggaaggttgagaaccactgctctagacccttactggcgaggtctgtgttcaaaggctgaggacgctggagtcgcctgtccaagtggccacgcaaaaccacagctggggagatgttcaatcagtaaagctcttgacatggaagaataaggggagtttgaacccatatcaaaaaggccaggtacggtgttgggcttttgtaatcccagcaataagaaggaagagatgagcagatctctggtgctcactgaacaagacagttctggcatagattttggaagtcttaggtagtcatgagagaccctgtctcaaacaaataagcaaagttgacacctactgaggaggaacacacacactcacacatagacatacaagcacacgtgtgtaggaggcatgaaagccatgtgctcacagataagcactagcgaaaccaggaatgttaaacgagtaggattatctcttcaaaggagagaatatataagctgttttctgcctagaaggctgggagggatgtggttaataacccgatgaccttcattatctgtgtggggctgagaccacaccagatccttccccacaccctatcatgaacttgtttttcttagtcaatctataaaacccatctttatagaagatgtcacatgtagtcaatctatagaacccatcttcacagaagatgccatgtgtgattcacagacttccaaggtagtcatgccttaagtcttattgttcacatcggactgagttaatggtcaccaagaaatttttttcactgaagtgtgctatgcttaaatacccttgaaataaactactcaaggtcagactctcaaagtttgaactaacatgagctactgagtcgtgttgaactagacttctttcttgcctctgcagatcaacactctcttggcctttgtgtttgcagaggaccacccctgtacgacatatatgtgcacctgcacgcgcgcgcgcgcgcgcgcgcacacacacacacacacacacacacacacacacacttcatagcttcaagcagggtgcactgtgcaagggagagtatctccctccacttttacctccactgtgactgtctcctcctcactcccagactcctggattgtcagggcaggggttccttcctcagttcagagccatcttccagactactctgaaaacacctagggatacatccaaagctgggctttaccacttttctggtatctcaaaagccaatcaaattaaccattgcatgaatcatctgaaaattctatgcaggctcatagaattttaggtctgcaatgccactaattagctacacagggaaatgtatgatcaaagtaaagatttgaggaatttttttttttggttaaattttaaaataggtatatgaaaacagtggtttttcttctctctctctctcttttttttccttataaaggcaaacatttaattgggactggtttacagtttcagaggttcagtccattatcatcatggcaggaagcacggggacatgcaggcagacatggagctagaaaacaagctgaaagttctacatcttgatctgaaggcagccaggaggagagtctctttgacaccagccagacttgaaaaaaaaaaaaaaaaaatatatatatatatatataacctaaaatccctaccactgcagtgccacactgcctctaacaagggtacacctcctccaataaagccacacatcttaatagtgccacttcctgtgggccaagcatatccaaatcaccacatgtaaccttccctcacacccatctctttgtggtgaaaaaaactcaattcttctcttttgagccagatcctgcagtgcaaacttgggagattactgagggagaataaaaaattctagacttctctgggtgactcaatgagcacaagtattgagataaagactgaaaggagagttagggtgtgtggcttaacggtagagtgcttgattggtatgtctgaggcactgggttcagtccttaacactacacacactccttttctgcttatgtcttgaatatacacaatacattgtgcttacctactgacaccctatggtgtaataaaacactaggatttctttctttcattcaactacaactccacagccattagtctttcctatcctcccctcctcactaatggccccagccttgggaagcaacagtggtttttcaatttgtaccaatccttaaggtcctgctatataaggaagttttaccagtgcttaggttttggcgatctagtaaactttgggagaacaaataaattccaactcctcttttctaactgtaactccattggcagaaccaaaagaaaaacatgtcttagatttcccaaagcaatcctcaaggaatgagagacatttttattcagagtgtttgttaggaaggctttgcagaagaaaacaaggaacattttaaggtagctcactgtcatgtgggccctggccccatccatttctatgtaaatgagtggatgcccagggcagaattcattggtgtgtgcccaatgccaggcacaacatctggcatatgtaacaggtgccccaccctttttgcaccccccccatcctttatgtgctagttagggtaactgttgagataactgtccaaatgagaaccacttaacagggtccttcaaatttcttagttatgttacagtgtaactctgttcagcgaggggaacacatctgtgatccacacagtcattcagggacacaggctccatccagaaggtggcttcctctttccttggagctgtggactcctctactgggtcctgtgtatctgcctgggatgcaaggaagaaagaatatagagaacaaagggttatgtgcttggggttctggccagccctctgtaggcataatggttttgtgcactgtgtaaaggttatcctggtgttattcaaatgctgatttctctgccctactttcctgtttcaatccagatgtggctttgttatgtttattcttagacgctcctctctcaagtttgtctaaacgcagctcctcattcattctctgccttgtcagtaaaagccaacgagccaatacagagctttagagagaataaggtgggacttccgattccaggaggagtggagaaagagacaagaagagaggtccaggaagcattgggagaagtgagctggaaaaagaaatgactaaaaaaaatatcccaagtaagatgggaatattgtctgggggaaattctgagtagcttggaggtttagaatggagtaataattgctcaatatttggctgaaggaattttaataaatcttattctctctgtgcggtgatttgggggaattagctggctaaggaataattgccactgcactaattttatgaatctatattaatatggtgatcatttagcagtcctccagtaggctcctatcccttcctctcacaacccctagctcagagcaaagttttatggcaaactacctctccaactccaagagagctgcaagctgccatgtaacacctgcagagaaggggcaagttgtaaacacagggatgcagtggttgtagtctgtgagtgaaccctaacttttttttctgaaagggaaatggaatgctttgtcaccacattataggacttacgagaagtagttgggcatagaggcttatgcctgtgacctctgcacttcggggactgaagctccaggccatgaattgtgagtaacttggaagttcagctccagtttccttccctctttctggcggccttgtagcatccgacagttctgcccaccagcgaccctatgctatccacatccacagctgcgatcttggtgccctgcccttggtgaggtttctgctgagatctgtgcttgtgtcagatctgcttctcatacagcagcaaacaccgagagagatggttccgagtctcttgtcctcatgcagaacctatcttagtttctgagaccttctatagtttagaacagaaaggtcctccacaggctcatgcattgaattcttcagcttgtgttgtagaacagctgttctcaaccttcctaatgctgcgacccttcaatacagttcctcatgttgtcattgattctccacctcccaccataaaattactttccttgctactctgtaatcgtaatcttgctactattacaaacaaactgtaatgtaaatatatgtgttttcttatggttttaggcaacccctgtgaaagggttgttcaaacctcaaagaagttgagacccacagggtgaaaaacactgctctagaaggtgatataaatttcaggagatgggaactgttgggaggtcactgggagcacattcttttctttaaaagtcatctcttttattttttagaggttataataatattatttcccccactcccttttctctttccaaactatcatgtatacccttccttactctctttcaaactcatggcctttttttttttttttttttttatgattggggtgtgtgtgtgttttgtgtgtgttcctaaatatacaaatataactgatttactctgtatgttacttgtatatgtatctttgcagggatggccatttggtaatagatcatttaatttttttttctttttaatgatgtgcgtttctgtctgaatgtatgtcatatgagtgagtctgtggaggccttgtcatatgtttgtggaggccagcagagggtgtcagatgccctggagctgaagtgactggtggttgtcagccaacagatgtaggtccttggagctaactgctggtcttctagaagagcaggaaatctttgtaattgttgagcgatctctccagccccaacagagaacattactgaagagggcaacagaaccttgtgtcttctcttcttcctttcttcctttttatttccctgctgtaagggaagtggttttgctctgctgagaaccccttccacaagccctcgagggtgtggtgccttcccacaggcatgaaacagtgaggcaaacccaccatagatcaagtcttccaaaaccgggagccaaaagaacctctttcctgggctgaggagatggctcggtggttaaagtgtttgctgtgcaggcacaaggaggtgagctccattcctggtacccatataaaagctgggcaccatgaggcctatcagtgcctccaggtcttaggcagaccccaatggcttgctggccagtcagtgcagttgaaccagtgaactccaggttcagggagagaacctgtttcaaaaaaacaaagtggaaagaagacaccagatgttcagctctggcctctacatgtgtacacatggacatgtacatgcacaggcgagcaaacctacataaacattgcatactacacgcaagcacacacacacacacacacacacacacacacacacacacacacacacagagttggtttgttcaggcattgttagagagatggaaggcagactaataaacatatatagtagacatcttgctgaagactctactctttgttgtggtcaatctcttttatttatccagaaaggaaccttcgtgtgctctcattatgggttgatttctcccgaggtgggatgccgtcatgaccaatcagttacatttggctttgtggaaagagaaaaagtcaagtttcaagcttaatacttcttgtatgaatcagaccattgtgtaaagagaattcctgctgaaccggcttctgatccaaatgtgacagccgtccgatgcagtcagcaaacactccaccttgaattaggacaaggaactgtttgtttccttcaagaaccctgtactgataacgctgacaagattgacacactgggttccttggaaagtagaaatttttctgagaattgttccagaaaaaaaaaaaaaaagaaaaaaaaaaaaaaaaaaagaaacaagaagataaaatgctatgcaccagaggcggggtagatggttctgtaggtaagagcagttgctaagcaagcatgagaatctgagttcaaacccccactactcacctaaaaaactgggcgtggccttgcaggtgcctgcaaatcccagtgctgttgggagcagagctgggggagatattgctgacacttgctggtttccagcatagctctgagtcagagggcctgtctcagaggaacaaggcagatcaagatcatgccaagagcaggacatctgatgacctctggcctccactgctcctcccccacaacttacatacacacatgcacacatacaaagggaaaaagcaacagtctgcaataaaatctccttccattttggaaagcatcaccacaaaggcctttcaccatttgattgatgagagtgggtgctcaggattctgttttaataagcaaggctgttcagggatacttcagctgtgcattcccttccaaagtccaggcgcacacagtcttgatgatgactgatccaggggctggagacatggctctgtgattccagacgtcatgggtgagtatctgtatcccagaacccacatagtgactcacacacacatctgtacctccagtctgaggggatccaatgccattttctgggctctgggggcagtaggcacacattcactcaagcaggcaaaatacccatatgcgtagaataaaataagacatttaaaagatggctaatctaacctaacagaatttcacatagccctctttttttttccagtcagttggcttcctagcttgacgttatgacaagcaagtaaaggcatagatgttccttctttagctgtaaatgcacagatggcccctcttctttagctgtgaatgtggttctgataagaaacaagagttaaaggagccaacattagtctttatcactcctcagttactttgacgcgcctcagaaaatgggcttgtttttaaaattcagcaacggcttataagactaggatgcttgcctagctcttactcagggacacacgacccttgaagagggagtcaaaactgatggtatgcattagaaaacctgccaaagtaggttttaaggtcttgagccctgttaatacagacagtgcggcgggatgagagtggtgcccatgggctcctgtgtttcgatgctgcattcccagttatggagctttggggaaggattaggttggctttgttaggggaggtctgtcataaggggagagggagggacttggaggttgcctgttatattaagaattaattaccgggctggagagatggctcagcggttaagagcactgactgctctctagaaggtcctgagttcaaatcccagcaaccacatggtggctcacaaccatccaaaatgagctctgacgccctcttctggcatgtctgaagacagctacagtgtacttacatataataaataaattaaaaaaaaaaaagaaagaaagaaaacgccgggcggtggtggcgcatgcctttaatcccagcacttgggaggcagaggcaggcggatttctgagttccaggctagcctggtctacaaagtgagttccaggacagccagggttatacagggaaaccctgtctcgaaagaccaaaaaaaaaaaaaaaaaaaaaaaaaaaaaaaagaattaattattcttaatataagtgtaatcgatgaattaatctggtagctgtatttgtttaccttatgctagttcctactaactgtacagagaaatcaagatttatttaaaactgtacctcagtagctgagcaggaaaagatgtaccttaaacttgtgtgctaatctggctacttcccagccccatcccagaatacttgcatattattattgatcttcagtcctgttcctcatggctccagttcctctgttctaccagttcatctgaatttccctctcttctcttttttcctctggttggccaatgtcccaccctcttctctattctgttgagccattgggtgatcagcatttcttgaggaggcaaagaataaatggtgagaactgtttacacaaacttgagacaggagattcttggtataagcatcacaatgacatgtcctgattgaaacaggatactagggcagagaaatcaacatttgaataacccaagggtaaactttacacagagcacaaaacatcacctgacatctgcagggggtggggtgggggaggggctctaagccacctcagcgcagtttgaaatgtgagttcccagcattcttaaaccttcactcagccatcagggactcgaacttcaggatctgcaaacaagtcagctctttcttttatagcttgtctcagtcctagtgttttagcccagcagcagaaaggtaaccaatacaggcagtaattctattcttacacgattattttaaagagttagtaaaccgggcgtgggggcgcacgcctttaatcccagcactcaggaggcagaggcaggcagatttctgaattcgaggccagcctggtctacagggctatctcgaagaaccaaaataaataaataagtaaaatagttagtaataaacacagacaagggtctgtagtagacagcccttgcttatcacagtcccaagacccccagtgccatctgaagctgcagactgtaccaagcttgataccaactatacttgttcttcactatccatccctatgatagcttaatttataagttgggcaaaataaggtattaactaaaagaactagtaacacatagagtgagtgtactaccctgtaataaaagttatttcagacttatgaattggttacttctagaattttccatttaatgttttcggactatgactgattccatggaacaaacgcacagaaactaaaaccatagataaaggggcaactacagtatatccaaggaaggtcattgctatattatttacatgatggagaaattggaaatgaacttgattctttaaaaaaaagggagacagtctaccataaaatattgtgttaaatccaatgttggtgaagatagtgtaataatataaaaaagattccagtgaaaaacatatctagaaaagggcctgcgattatagataaatatttgccctgtgaatacatgaatgcgtatcactttatttttatttatttatttatttatttttgatttttcgagacagggcttcactgtgaagccctggctgtcctgaaactcactctgtagaccaggctggcctcgaactcagaaattcacctgcctctgcctcccgagtgctgggattaaaggcgtgtgccaccattcccatcgagtatcactttataatcagaaataattattttaaatgatctggagagattacatggcctcaccctcaacccctcctcggcttctctatggtctggttctttccgaacatgttcaagggccagggtattcgtctcttaggctttggtgattaaaaacttccagcctgtggaccccttgagaaagcctctttgcaggaagaggggaacggtaaggagtatcataggagcgcagaactttgatctgggaatcatcagtgtcagcaagaagaccatgaaacattactggacagaaagaaaaacctcctgcccaatgtgctttctctcttaatcatgaaaatctcaaaacggaggcgtttccccagccagaatcaccagatgattataatttggtgattatacattttcctaggactacagtacatcttctggcaatgttgagaaagtgattgtatcctgaccaggctggttgaagcatttctttcccctctacagcctgcccagaggtagcccagtatcccaacacaaagtctctccttcctgcgaggccgggcagacttctgcaagcaggctgtaaaaggggcgggttcttaccccccaccctagcagccctgtgacctgtgccttgctcactctacccctcagtactgtctttcctgaggcattggctctgccaccataagaaagccaccagtgtctagaaatcttggcatctgatggccagaggttgggaaacctcttcttggctctggatcttattattattacttataatgaaaaaatagccagagaaataaagattagcattttttaaaagtatcctaggtagagatgacacttctggaattatacagaggggaagaggataaagacaacatgaaatcctgaacgtgaccttgagtgtagcttacaaaggacattcttagtggtagccggatacatttctagtatcaagaaagggttttatacaaagaaccttttgttaataatagttattgaccatttggagagagacagagacagagacagagacagagagcatgcatgttttctgagagggtggcttaagggtctctaaaattttataagcatttccttctttctctgttttgttaagcgcgaagttagaaacatttctacctcattagcctcaattcaaagactcatttgggacacctgctacttaagcccagttttctatttttaagaccgcaatcttgggcattcttgaaaagcatctgcttgtttattttagttcatttttaagaaagtagctcctggccaatctgtactgcagtgtctgaagagatgtaacgaaactagatatagaagactgacatgtgttgtgtgtgtggtatgtggtgtatgtgtggtgtgtgtgtgtgtgtgtgtgtgtgtgtgtgtgtgtgtgtgtgtgtgtgtgtgtaaaagggcagtgggttgaaagccatattctgaatcaagggcaacacctgttaagtggaaactggttagctataaatagagtgttaaacaggtagatcagaacacagtaatggaagcctagagtcatccctacctctgaagcaaggaaacctgtgccacactatgtaggtcctccctgtcgcaggattttccttgtccaatcatattagggcagcaggaggcctgtgattggacagggaaaagagaggcggagctaagagttgcaaagacagagaatgtctcagcgagaaagggaagcctgagatagaagtggacaggaaccagagtggctttaaccgccacaggtagttctgatatcacaaggtgagaataattgggataaagctttcgtcattatcatttggctctgaaattattgtactggcatcttgtaaattgagaatttattgatacataaatctgattggttaattataagcttcacgagttttgcttctacctggtaaatgggtgttgtggtggctgaccatggggtggacagttgtggtgtggggttggtgtgacagcaaaaggaactcgggagctctggcccccgccagagagttggcaggtagagacagagcccatgggacggactgccatggggccgagaattgccagcaaacttgtgggactgtgctgggccctttaaaaaaaaatatttcccgcagcacctcccatactgtgaatgttgaagaaagtgttaccatttttggaaacttcaagaaaatgattcaatcacctgactgggattcatgtgtgctcacagagattggagagcttatatgagtctgaccgaggtcctctgcatgtgtgttatggttgcatagcctggtgttcttgtggaaatcctaacaaagggaacagggctgtctctgagtcgtctgcctacttgtgggactcttatcctcctaccggatggcctcatccatccttgatgtgagaacatgtgcctggtcttatcgtagcttgttatgccatgtttggtggatgcccctgctcgtcctgctcttttctgaggggaggtgaagggtgatggatctagggaaaaggggaagttgtggggagagcccgataggaggggagggaggagaaactgcagttggaatgaaacatatcagagaagaataaataaaaatgaaaaaaaagagtaaatgattccatttttggatgtagaacaaaagcaagaagacatggaatgattaataaataggatacactaaacccaactgcatactctcaagcaaacttcccctgagctggattcccagatatctgggaccactccaaagtcctcagcccatcaatacatactttatgagaacacacagaaacagtcaatacattcaaatacacaacaaggggtgcctataggagagttagggccaagaaaggattaatgaaacacttttttcactgtgtctgtgttcccacataaatacctgaggcaaccaattcgtaaagaagtgattttactttggttcatagttttgaccttaaaaaatggtttttacatttatttacttcaatgtgtatgtacatacatgtgccatagtacacacatggatgtcagaggacaactttccagagttcattctcttcctctaccacatgggccctgggattctaatatcagccttggcagcaaacgaggctgtatctctccagccccagctcacagttttgaagtctcagaaactgcaatcatggccccctgtccctgggaccatggtgagtcagtgcatcatgcaggaactgtgtgggccttggctaggcagcacaagagaagggagggagcttgggctccacagacaccttcaagggtacacccttaagatttgtaatattgccaattagacaggatctagaatcactctgagacaaatctctaggcacgtttgtgagggaacgtttgtgagggatcatgtcgataaggttagctgaatgtgttacatatatatgtatgtgtatatgtatatttatatgaatatatgattggttacatacatatgcaccgcaaaatttgttttctttttttgggggggttcaactacattagtatttatttatttttattgggtatttatttcatttacatttccaatgctatcccaaaagtcctccacaccctcccccacccacccactcccacttcttggccctatcgttcccctgtactgaggcatataaagtttgcacgactaatgggcctctctttccactgatggctgactaggccattttctgattcatatgcagctagagacacgagctccagcggcgtactggatagttcatattgttgttccacctataggattacagatccctttagctccttgggtactttctctagctcctccacaaaattcattttctattgaacacttgcatcaccataaaatattttttttttacctcaagccactgtaagttagagactctgtgtatactaatgaaaaggtagaacctaaatgtgggcagcacaattccctaggctggtgtcttgcattaaatgaaggaagctggccgaccaccaggattagtggctttctgcttgctggctgtgtatctaatggaactagctggttcaaactcctgcttcaatgactttgccaccagggtgggcagtgtcctcaaacttctaagccaaaacaaacccttcttctcttaagttgtttcttgttgattttgtgacagtggcccctggtgacctttaagacctctcaccaggtcccaacagtactgcaggccatggttcgccatggagacttgggtagacagtcaagatccagtgacaacactccctaactccataatgacactctacaataacaacctaaaggaagcaccccaacaacaatgaatagactataacgtgtgtgtgtgtgtgtgtgtgtgtgtgtgtgtgtgtgtgtaatgtgaaggctcagtagtgagttgggtaggaacagtttcaaacagtgcattgaagctgcttccaattttccattattatagagtccctaacttacaatggcttgactgaaaaaaaaaaaacaacaaaacaaacaaaaaacaaccaactttatgatagttcaagtgctactgttcaatagacactgcattttgaatcttgttgttcagatggtatgtaattcatcctgtattagcttgccactcccaactgttccaagaaaatatgtctgtttctatatctatatctaaatgtgtgtatgtatgtatgcatatatgtatatgtatggtgggatatatatgtgtgtgtgtgtatacacacatcctactagtttgatgcctctggaacattgtttactgagttgaaatgttaattggctatctgatctctttctccacacatgcatacacacacacacacacacacacacatactttttgcccctctgtccctctgctataagcatgagacctcctgagaagttctggcacatattccttgctttagggagtgtttctgattaaggacttgagcaggttacagatgttaaacgcatacagccaagtattgagaatttgcctaatgaacctacttctcctgttatcagtcaacaactgaatgtagagtttcttctctcttccttttttcccttcttactttttctatctccaagaaatggcaggagccattctgcgtgactgtgatgcagtggggcgccatgctgacactgaggtcacaacaggcaagaaaatttgctatcagtgttccttactggatgttgctgtgcaaactgagtttaagctttcttggaaagggactcttcagcgaaactagaacagtattcttaatttattacccaatgcaatcacatcctctagctgttgtaatgagggtgacgtcaaagtcctcacaacctggggaatgtcaatgacatttctaccttgtggacacactgtggaccatctgctcaaataacgactaccttcgtgctagagagtctggtgagctgagcactttataagtcaccacgacctgtgcagatgcagctttgaaggcgcccactttctataacgctcagacaccccctcatccctttacaatgtaaacgggaagctgtagctttctttatgtgtcgtaagcaagcatcacaaactgggtaacttagaaacatagaaacgtgttttctcacagttccgccaaagaccaagagactcgaaggcaccagcaagactgggtcctttctcaggttcagagggagaatcggcttcctgcctccctcagagcttctgatggctgctgtgagatgtgtgatccaggacttacggagctttctcctagaaattgtagaaataaacaccaagactacagtatgggctcttaggcaacattttatctggaaggaaagcagagaagaggaaacagccacagtgattgtgggaggtggcggctgtctgtggagagagaccaggcaagctgcttggttgctggagtggtctgagggtttgttagtcatgagatgtttcctcgtggcttaaggggattttcctgtacaagatacggatccctgttcagttggccctagaagacattctggctttatcttgaatcttttgtgataagatagagcaccgggggcaagcgtgtttaatacactgttgtcatagaggagggaaactcttggtgggcaacaggtttcctggtttaaaggcataagaatctatgtctgtcctccaacagaagtctcatttcaatttctgtctcatttggtgcatcatttcgcctacatcttctccgtgttttctctgcgtaccttcattcctcttttctcgtctcccaccatccctttctcttgaccctgtctttggacatagggccagacctaagccagcatgctctcatctttttttttttttttaagaattacttatttatttttaaaggttcatttattttattatgtatatgagtaaactgtagctgtcttcagacacaccagaagagggcatcagattccactgcagatggttgtgagccaccatgtggttgctgagaattgaactctggacctctggaagagcagtcagtgctcttaaccactgagccatctctccagcccgcatgctctcatcttgagatcacccataactaataaatgatgtctccaaagattcttttcccgaattaagtcacattcaggttcctgggactaaagcgggcaagtgaaccaacccactacataaggcttcatgatcgtccagctctatattcccagtgggaagctgaggtggagtcccagtggtagcacattgaatcctttgactgctgttgtgtggagaactataacccttcccccatgccctccccccacaaacttaatattttacatctttagagaggtgactagattaaatgaagttactaggagtagttccctaatgcaattggactggtgtcttcatcagaagaggaaatgaggtcagaggaaaagatggctatctaaaagcgaacagaagcctcaggcatcgttgctgaccccaggtttccaccctccaaggccacgatgatgcagattgctgtcgtgttagtcactctgtggcactttcgtcacggcaccccgtcacggcaccccgtcacggcaccccgtcacggcaccccgtcacggcaccccatcaaatgaacgcacgtgcttcaaacccactgtctgccacagttccacaaggcagaggcccatcctgccaggcactttggggacagctaccacattagaagagaagaccctcaagtaagatatcctgtctcttactaatgaatgtctcaatgatagggcttgttattctgtttttgggtgagggtgttaggtttcagacccaggacaaacagctgaggtgtgtattttaggtatgaaagtgtatctagcctccaggttctcccaacatccctcagtccctacctgttacagggcatggctggcatgccctgccctctgcccttaactttccaacccaggggctggacttcccctcccctgaaagctcttcccgatacaatccagacatcttggtcttttggtccctcctctctctgtctctgtctctgtctctgtctctgtctctgtctctgtctctccatcttctctctccctgcatgtataagttctttctctcttcccttccccccttctgtctccttcctcatggtgtcttccctggcctcattccttgggaccagtgatcccacctaagagcaacttcccaagaaacctgcctttatatactttaatctggtttgaattggctcctttgatcatcggagaatacttacggggtgggggtggggttggtattttgagacagggtctctattgagctagcttggaactcactgtagactaggctggcttggaactcagagatccacctgcctcagcctccctggtgctgggatcaaagctgtgacccatgcctggcttcatctatggtcttgttttgttttgttttgttttgtttttttgaccagcagtattgcttcctggtgatcatgacatcacagcacttctcttcatcagtggattcttaggtgtagtgaaatggcttatgacatcctagaaaacgattggttggtttcatgtaggtgttggtccctgagttaattatgggtgtgtgtgtgagagagagagtgttggctggttttgtgtcaccttgacacagactagaatcatctgaaattgagaaaatgtccccatgacattgagctataggcaagccagcaaggcattttcttaactagtgattgatagaggagggtccagcccattgtgggcagggccacccctggacttgtggtcctgggttctataaagcaagctgagcaagccatggggtacaagccagtaagcagcacccctccatcaactcctgcttccaggttcctgctctatttgagttcctttcctgactttcttcagttacggataggatgtggaagtgtaagccaaataaatgcttatctccccaactagcttttggccatagtgttttaactgcactagaaactctaagaagatgggagacctactgaatgagaactagagcggggctctgtcgtcggtagtgtgtgtatgtgtgtacatcacgtgcacaaatgtaaggaggctagaagttgacatcagctgtcttgttttgagaaagggtttctctgtgtagctctggttgtcttagaattcaccatataggggctggagagatggctcagcagttaagaacactgactgctcttccacaggtcctgagttcaattcccagcaaccatatgactcacaaccatctttaatgggatctgattccctcttctggtgtgtctgaagacagtgacagtgtagttgtatacataaaataaataaatcttaaaaaaaaaaaaagaactcactgtgtagaccaggctggcctcaaactgatagaaatgtgtctgcctctgcttcctgagtactggaatgaaaggtgtgtgccatcaccacttggctgacactgggtgtttttcttaattactaccttgatttttgagacagggtctctcaccaaacctgaagtttatcagttctgatagacttggtggccagcaagccccagggacgctcctgtctctacctccccagttctgatattagtaggtatgtgctactatatctggctttttaaatgtaggtgttgggcattaaacccagttcctcatagttatgtagcgaacaccactgactaaggaaacctccctagcccctgtcatctgtgttctaaaaagctctttagattcagattcgggttgacatttgacaaccactagagagaggagcaagctgtccagagctgaactgtgatgccacgtgccccacagaagcacatgtgtgtgtgtgttattaacgtgttgttaacgtgttccctccagatgaacctgcaggaagcaatcagtgagcctggggtggccatggaggggccaaagacatatacttctgcaaagaaagccaaggaaaaaaagaactttgcttcatggccgcctctcttgcctgagtgtcagctgtttgacatctttccactcctccgagcaacacagaagaacatggctctctcagaagacgaaccgggcatcctcccaaaactgtcacaaaatggcacatcctgcagtatttactgatcccctgggaaatgctaaccagaaattgggtttgcttcttgacttgtgtcttcacagttgaaaaccttctaaaatggacctgtcgctttgccacacacagaccaggaaaaccctaaggggcaagaacttggaaagatttcggatctttatgaagcactctgactcaaattccgacttgatttctggagagacgaaggctgggagtcactgagttctcactgacctctgagctttgtgtgtgatctcagggggacatcgtttgtggcacatcccagtgtgtacatctacggctcatttcccatttatagctgacatgtgaacgtcagctactgggctggcagttgccggaagtgtggcacattttaaaaaacacggagacacagctgctaaagtcactgttgtgtccctaaaaactgaaatggagtgctcaatgcactggaaggaagaaaacatcatcctaacagccatggcctctccaggagcccccagatctctggttcttgttttgagcattagctctttccattagccagtgtaggcagccctgactctatgattgggagaagcaacacaaagtgaaaatagagatcttctgtgtgaaagttcctttgaggtgggaacattgaagcaagtgagaggtctttttgagtgtggagccccgtgcttctgaaggagtctgacccacgaagatagctcggtgtgtaggagctgggatgaaattttacggaccctgatacctttcaagaaatagctttatttttcttcagaaaccctaagaataatccttttatatacttattttctttcccagatgtactgcccagatgtgattgctacgatgaaatactggagttataatgaaataccggaaacacactccttataaaggaaaagagatttatttagcacccagttttggagctccaagggcatggccctctataatatgttctggtgagggtctttttggctgtgtcacaagactgcagatagtaatagtgagctgcattgctaaacaaagagttagagagagtaggaccccactctggctctttatcacaatcctccccagagaattaacttgcaagaaatacttgtattcctttcgagggcatactaccaatagaccaatggatctcccatgaagcaatatctcttcaaggtctacccagcatcatcacactgggagtcaatatttcaattcatggacccttggtagacaaaccagttcctaaccataatactatgaaagagaaaacagcataataaggaagcaggcatatttgatatgacctccattagtcccagggtttttttttgttttgttttgttttgttttgttttgtttgtttgttttttgtttttcgagacagggtttctttgtatagacctggctgtcctggaactcactctgtagaccaggttggcctcgaactcagaaatctgcctgcctctgcctcccgagtgctggtattaaaggcgtgtgccaccatgcccggctagccccagtttttatccccttgaatataactggtcctgggaatggccctcagcggtaccttctggagatactgaagcatgcttccccatccacgagtgctggataggctattaagactcagtagtggggctggagagatggcttagcagttaagagcaccggctgctcttccagaggttttgagttcaattcccagcaaccacatggtggttcacaaccatctgcaatgggatccgatgtcctcttctgttgtttatgaagagagcaacagtgtactcatacaaaataaaaataaaaataaaaataaaaagttcattagaagcactgggggtgcatatctttaatttcagcactcaggaggcagaggcaggcagatctctgtgagtttgaggccagcttggtctataaagtaagttccaaggcagctagggctgtacatagaaaccctgtctagaaaaacagacagacagacagacagacaactcaatagaatggcagtggacttgacagaaaccctcccctcacgatgtctgcctgagcttcttgtgcttctgttccttactgtgagaatgtcctgtgtcgctgcaggttcaaggaaaactggagaaataaacccagagtagactcaaccccgaaggggaacccagaatagagctctccctgccgacctgcagatctcagcgggggaaaaggtgataccgttgtgagccactgagccatttctcacacagcgtgctcaaaatagaaacccggtggagaaggtatccttcccaggcagaggctgagaaatgagaagagatgttagaaaaaggccaattaatgctaagtatcgatggtcggtccccatgttcaaatccagccaacagttattaaataagttcaccactaagcttcctaattagaatccaaactggaatctagtctgctgtgtctcaaagtcctttccgcaatgggcagagaactttggagcctgcgtttgttaagctatgactgtatgttagtgtctgggtaaaacactgtcttatgttttatttcaaacagtcctttccataattctgtgctttcatttcctaacagtatccccacttttcgtcataggaacggaaacccagagtgggtaagtaactgtcagaagcagtagaggctgatgacaccccaggctcacactgaaaagccacaccttttggcccagtttgtaaaatgcttgccctacaagcataagggcctgctctcatcaaaagccatgtgtggggttgtatctaaaatccaattgccagggaggcagaggcagggggatctctggagcattctagctaactcctcttgacaaaacaaagttccagacccagtgagaggccctgtcttaaaaaaaaaaaagctgaacagaggaagcagatgtctgatactgacctctgacctcacaggcacacataactgtacaggatattacacacatgaaagaaagacgagtataggatgagaaggaagaggaaggcaggcaaatgggaggggcatagcttacccctgaacttgaccacagcgacttctgatcttggtcatcagcttaaaaatatccatgtgacccggtgagctggcttggcaggagggacacttgctgctgagtctgacaacctgagtgagtttggtctttgggatgcgtgtggtggaaagagagaaccaactccttcaagttgtcttctgacctccacatccttgtaagtgtacatgcaagcctgtgaattacattattattacaattctgtgtatattaattaacactgaaaattaatacagtggcaattattccttaaccagtttcccccccaaataaccacacaaaaaccttttaatatttcaaagctttaggccttagctgggcagactctttttttttttttttttttttttttggtttttcaagatagagtttctctgtgtatccttggctgtcctggaactcactttgtagaccaggctggccttgaactcagaaatctgcctacctctgcctcccaagtgctgagactaaaggcgtgcacccccactgcccagctagctgggcagactcttaactcgctcatctaagttaacctgcccatctagccccatccagtcaagtgcctagctataccttccaggcccatagtaacttttatcttctctcatgtctcctgatgaagaggtttttctctttcttctctatcccaggaagtcacaccatccacttcctgcccagctaattggccatgagattttttttttattattattaaagtcaatcaaagaatgccttacataggtgaggaacaacagagacacaattttatacagtgtatctccacaatgcccccatcccactcaaaataaataactgagcaaatgttaaaaccacacacacacacacacacacacacacacacacaccacacatacacacacacacccaccacacatacacacacaccacacacacacatacacacaatgttaaaccacacacacaccacaccacacatacacaccacacacacacacccacacacacacacacaatggtagctaaccccaggatactttatttagttataaatataataagtcatgtactgtatagtttctttttttaaaagtaatttccagggttttccttggagaaacagtaggcaaacctgtattttagtgagatgcacctgatatttgggtgatgttaggcatggtagttacaggcagaaaggacagtcccaagcatttacaactggaatggacgtattcccagctgctgaggaagatgccttgtctctgccctgtcaacctggctcatgggaatgaagaaccgttttccccatggactctagtcagtcacgtagccatcctctggagagtctcccccacccaccccaaaaagacagaaaagaaagaaggacagattctcagatagctcaggctagtcttcaacaagatatatagctgaggataaccttgaattgatattcctactgcctcctctttctaaattctgagattacagacatgtgccactgtaccctctgagttgatcttctgacctagaatttatgatgtaagggtacgaaagggaaactccccatgggaaacagagtagtgccccagagtccacacagacatctttccccaatcactggagcctgagagtcacatggcaaaggggcatagagctgtcaatcaactgaccttaaagcgaggagaatgtgggccaggtggtggcagcacatgcctttaatcccagcactcaggaggcagaagatgagtttgaggctagcctggtctacagagtgaggacagccaggactagacagagaaatcctgtgtcaaaaaaaaaaaaaaaaaaaaaaaaaaaaagaaaaaaaaagaaaaaaaagtgctactttaagcttaagacagctttgaagggaggctctatagccaaggaattcgggaagcttctaaaagctaaagaggtaaagggaagacactccacactagcacagacctgttgacctttcaagctagcctagtgaggtcctgtttggacttctgagttccagaactgtaagattccaaatctgtgttgttttgagtcactgattggttggaatttatgatagtgaccactaacaaactccaacactccctaaaagaaaatggtggtgctttttccagaaggaagggggtgctgggtggggaaatgccagagtctgtaaactagactctgggcatcttgttaggtatttgctgtggggagaagaaatctgcgttcagtctcatctatagtcctgtgtatcgggtcctcagggctcactgtgcccttcagcaagagcagaaaagcctgcatgtactgcccagcccggacacctgcttccttccctcactgctgttcaccaccaacaagttactcaatcttcgtaggcttcgggaagatgatgatactcatcagatgggttttatgaagattaaagatgaatacattaaaaaaaaaaaacttggccgcactgctggcacatagggtacacttaagctactaagtaattcttgggacattaggtaatatagtataattctgccttggtgccacgactgcttgggtatgaaagttacctttgccacttggaatgtctgtgtgagcagtgattaatgatctcttaggccgtttcattcttatgcgaaacgcaatgctacgggtattacctcatcgagaggtgaggaggagtggggtcagcatgtttaactcagcagctactgtttgatgtatatgatccatgccatccccaccatcagctgtccacctttgtccaagttgccctccctccctccctctggatggttgatacgtaagcaaagcatcccaggagggtggcatctcacaggatcaccaagaccttctcatgtgggaggaaccatggttgccacaccgtaggggagcaatattatctttcttccaatcaggaagcaagacacggcagtcctctggcaagctgcgtacttagcacacgagaaacgagggcagtaggaaattcagtgtccaacgcacacctcactctgtgggacagggatccctacagactgcagggtcttgctttcctctcccctgcagtctgcaggagtgtagggttgacctgttgttgttttcacacttgataacaaggtgagagaacattaggttaaggagcctggggttttcctgttgagagtaatcctttcagcaataccaagaactctcacttgagagataacaacaggacctatgacaggccatctgtaaacaatcgtttgatggcgatagctgatttaatcagaacgttctgcttctcccccacgtgaacccgcacagagagcgcgccaatccagctgcaagaaaatatttgtttaactttgccacatttatttactcgttgggactgtttaacttgattggacggagcagttggaaagagcgaaaataccccaggccttctatgtctctgataacctggcgacatctgcctctcagcctgtttgtgttgtgtttctcaagtcctttgccctcatcctcctagtcagagatttggcctctttctgcaccaggctttggggacaggagggtagaatctgtccctgcctagccttgcaaatgattttaaaatatgatgcttaccctacaaagtctattgagagatgtgtctgtgcaaggcattgtctgtgaagtgctatgtatcataggaaaacatgggttaagtcataggaaatccccagtgtcattaagacccacactagacgcacaaatacttacagggcacatagaaactccaggaggtctgtagctaggctctcaggaaggttttgaagaggtgttatattgaggacaggctccagggtgggggtggggtttaaagtctgtgagtgagctttggcaagatggctccgtaggtaaaagtgcttctgctaagactgatgactgagttggatcccggaatccatgtggtggaaggagagcactaacttgtcctctggcccccacatgggcaccagggtacttgagtgtacagcccatgtcccctacagaaagaaagtcaatgtaatttaaaaaaaaaaaaaactatttaaggtgagagcagaggaagagctcaatgaagaggtggctgtagctgcagctggtttttctgagttggggaggattaaaaatatagacagcccttcagctcacatcagctgattcaaccaaccgaagcttaaaagcactcagaaccaaactgcccctgcgcagaacacatcacacacttttacaaataattgtttttaaaggttttgtttttgtttttacaagtatgtgttaggacctaggtaaactattaaggcctaaatgaaataataaggcctgggtaagtgttaaggcctaggtgactgatacctgaataacctgccattgtaaggaaactttcccacatgtttctgctgttactaggaaactctaatgccaagatggtcttcacactctgttatgtactgtgctcttgaaaaccaatcacgacagaagtcagtagaactgttttgtatagttacctacaaataagcttggacccgaccaaccacccaggagcccttcctgcacctatgtataagctgcccctgggaaggaccccaacataagagagacacctgtaccagaagaagaaacgttttggaataagacttccattttgagtagtggtctaagttcccaagtttaagttcccaagacctccctgggaactgacatcctatttggcagaaagagatgtgtacatgggtaactgacatcctggttggcaagttcagacatgaatgttagacaagttccatcctgacagacaagttagaacatgaatattagacaaggcaagtcccctgccacagttgaatatcccagtcagtgggagcgggattaatgcacaactaagacatgttcctaaggaaacccctatccctaaatgctgattggtggaataacttggcacagatgtttgtggaatttgggcttaaaaaaccctgtaagatctggaccatggccccggttgaccagtcctggggtgtatgctcaattaactatccctgtgtgactgagatcatagtcacgtggtttgtgaggcggttcctggaccctaacatatgtattaatcatatacagcagtggtgccattatgatctttgcatgcataaagacgcaatgtcttttttttttttttttttggggggtttttggtttttcgagacagggtttctctgtatagccctggctgtcctggagctcactttgtagaccaggctggcctcgaactcagaaatccgcctgcctctgcctcccgaggacgcaagtcttttaatcatggtcgtcctcttgtctttctcccttgctttcaatgtctttttctttattttttatgacccagtgagttcctgttagggtgttgtaggagtgggggtgggagtcatttacagggctgtgtgcatctcacaggtgactacatcactgaagaaaatgcttctccctccctcatgactctcacaacctatgatagacttcgaactaaaacggatgccagcaggttcaatcttgtaacatcttgtgctgatgaccatagctgctgtgagttcaacagtgtaacagccaagttgtgtccagaggtcagtggcttcccatttcctcaggttctgacattcttcccgtcccttcttctgtgatagtccctgagtcttggaaggggtggtatagatgtcccactcacggttgtacagtcaatggtcgtttaccctcattactttgacttatgagtcttgagggcacggctgatgactgcaaagagaagcatccatgtagctggtgtctgagtctcatgatctgagttccatcaccgtctacctgaggaggaggtggatggaaaaaactgacaactcaagcttgcttttgtgacatccacacatctactgtagttcctagatggacagacagacatacacacatacacagagacagagacacacagacatacagacacacacacagacacacacatacaaacatacacaaagagagacagagacacagagagtcagagagacagagaaagagagagagaaatatgaaaaagttctgtttcctggtccctagggaagaaaggggctgcaggctacgtacgttcaatgactgttctagtttgggaatcttaagcaactccccaaggccatatgttgacttggtcccaagactgaagcattatcaggttgtagaaacttttagaagttgggcctactgggaggaagttaattcattagtgaatgtgccttcaaaggtgatatcaacaacccgacacctctcctttctttactctctggttgtcaccaggtgaggagttttcctttgtcacacagtcaccatggctcacagactgagggctctgaaactgtgattatcaaggtcattattgctactattttgttacaacaacagaaagctaacacaatgaccggtgatcaatcatgtcttttaataaaactgacactagtacctcggcgacagggttggcagaacctctggagtgaagtacattcacccttcagaagactcgcatatcacaaacccatagagcagtgggtgttgtagttaatatttcatctcaatcagggggtttctaccccacctttgaccactcggttcccagataaaagacacaaaacttttatacttataataagccttttaagtactaaagatggacagatatctaccccctaagctattcaaatttatttccccatcaataattccaagttgtaagtttccatttttcatctgggctgctctgaactccaaatggccagccctcagggccaagttttcatgattcgcccaccccatggtgtcttttcctttctctaacttctctctctctccctcctcctggttcttctccaatcccaagcctgggaacagaaattgcccatctctcttctgcccagctataggctgtaggcatctttattcaccaatcagggataacttggggggggggaggggaggatacaatagtatcactagggtttatgtgagaatcttctcatccagggccagtatttagcattacaacagcccaaacctcaacaagtgtttctcagctttcctaacactacagtactttactacagttcctcatgtagtggtgaccccgaccataaaattattttaattgctactttgtaactgtaattctactatggtgatgaattgtaatgtaaacatctgtgttttctgatagtcttggtcacccctgtggaagcgcctttcaacctccaaaggagtcttgacccataggttgagaattgctgacacaggggcttcctgtaaggggacccccttctttggatgccctcaactggctgtgcatttgtatactgtataacgaaccgcacagtgttaagtcaaaattgcacgtcactgtgggccaggctcccgagacccactgaagttcactaagttcattagccaaaacgaaattggtgtctgactttccaagaaatcaggagaaagataacagctggatttccccagaggcagcttcagttggcaggataacagtgccctttctgccttaatcctttgtccaaactaggtaacctggagtgacccaacattaaacatatatttttctattcttgcatcttccagcttgatgcctttaccaggagagcagcccgacacaacaaagtcaccttctgtcctttattttttgcttactttagatcccttaacctatagaacagtggttctcaacctgggggttgcatcccctttgggggtcaaatattccttttacaggggtctcctaagaccatcagaaaacaaagctatttacattacagttcattactgtatcaaaagtatagttatgaagtagcaataaaaataattttagggttggggacggtcaccacaacatgaggaactatgttaaagggtcacagcattaggaaggttgagaaccattgctatagcaccaagcccctctactgagcctactaaaatactttggaatgaagtgttgcctgcctctagaataaaaaaaaatattaacctcctgggggtttcactcagtcagtgattgtccggaatgcacagaacactggatttgatttttagcacttcataaaactggccatgtgcacctgtgatcccagtgtggagagaaagaggtagaaggactggacagtcaaggtattcctgtcaaggttacaggtacaacctacttttgtcggtttgctgaatggtggtgttgtcaagctgccttctaaatatttctatttatactcatagatttatatttctctcaactttagtcaggaagactccttgttcccattggtcaagagaggcttgtgattggtcaaagtactgagaataatgtctgtgtgtgctcatcctcagaggagggatccttatcgatgcctctcaaaaggttaagagagcatcgcagaggagagggtggagagaacgtgaaggctggaggactgaaaggtgtgctgtcttctggacaagtcatggccattggctgctgaactcatgagctcacacagtggttacctgcgaggcgagatcccagctcggacagggaagggactgcaatgctattggctgctgctgactgctggaatagagtgagtcagtttgctttgggaatgtggtgactagaatgcccgtgttcagtggagggccccaccccatgcacgtatgggcaacagtagttggactctgtgggtgtcttagacttgctgtcctaggactcactttgtagaccaggctggcctccaactcacagagatccacctgcctctgcctcccgaggacggggattaaaggtatatgccatcaccgcctgactgagaaaggagtcctagttaaggaattgttcaggtccgatcagcctgttgtggatattgaaggattgtcttccttgttaattgatgttgaaggttccagccaactgtgggcagtaccattccctgagcgggtggtcatgggttgtgaggttatgggaaagctagctaagtgtgaagctgggagggggctctcaggttgcatgcctccacggtttctgctctactccttgactgtgaatgaggtgatgatgtgttgagtagcaagtaggtctgccttcaagaccctgccctgacttctgtcagtggtggactgtgtgctggaagggtaacccaacaactcctttcatcctctaagtcacttttggtcagtgttttatcaacgcagcagcaaggaaacaaggacagcgcatcatagaagggaaaggaggtggagagggaggagaaggagggagggggccttgtacattacattgtaaggtacatggagaagcaggctcagcagtgggcctgtgctccttggtccatttctgctagatgctgtgggtgtccagacagaaattttgctgtctgtctgtctgtctatctatctatcttctatctatcatctatcatatctatcattatctatctatctactatctatctatctatcatctatcatatctatcattatgtatctatcatttatcatttacctattacttgctattcatttgtttacataaacttaataaattctttcattcaaaaccagaaatataatcatcataggtcattctctggactctttggagacatttttgttttgttttgttttttgtcttttgagttctaagtatggttggaggagggagaataggggatagatataatcaaaatgtattgtgtacatgtatgaaattctcaaggaataagttttttttttaattttttaatgaaagtgcctcattcagttgggtgtagtggcacatacttttaatcccagcacttgggaggaggaggcaggtggatctctgtgagttcaaggccagcctggtctatataatgagttccttgatagtcagaactacatagtgagaccatatttttcggggggggggaaaccaacaacaaccaatcaaccaactaaccaaaccgagagagagagagagagagggagagagagagagagagagagagagagagagagagagagagagagagagaatgaatccagcgagacctgtccagattcttcttggcatctctttatgatcttcttcccttttgtgtatggaaagagatctttctagaaggaacttatgatctaccaccatacagagtagtccagagaattcctttatggtcaggtcacagaaggtgaaggactctgaatgatatagggttcatggatacctttgggaggaagtatttacagtttttatagagagagggagagggagagggagagggagaggaagaggaagagggaggtgtgtgtgtgtgtggtggggggagaacaaagcacatactaaatgctgggaaagggtcagcattaataatgatgaatttctcatagctacctttgttcaggatattgtgtccattacttctcctaagctctctaccactccagttggagaagaaactcggaagggtgctggagggagggacaagcagttacacacaaaaggcgaagcagaaggagctacggaaggatgcctacacgggccttaacacatctaaaagccagaccccccaaatgggggctggaacgaggatgttagtgaatgaagtgaatacatagaaccattaatcccatacttgcctgcaagttgaggctctagactgtaaaaggcatacaattgtctctatagcagtggttctcaatctatgggttgagacccctttggaagatcaactaagaccactgaaaaacacagatgtttacattaagattcataacaatagcaaaattacagttatgaagtagcaataaaaataattgtataagtaggggtcaccacaacatggggaactgtattaaagggttgcggcactaggaaggctgagaacctagggaataggaagctcctttcaggagtaactagaagaatgtcactttcccttcaacatctagaccagggtgtaaggcccaggagcacgggaccacaggacagctggctacaaagggctgtctggttttgatgatgctatctacaaggcagggttacatggttttctgctccttgggggccatctatcctgtccaatatagaaagtggccactgctctctagctccatgtcaggaaggccaggccttgagggagaacaggcctgagttttgcatggatccccactgtggaatccccttggcatttaaagatactaataacagctgggcagggttggtgcacacctttaatcttagtgctcaggaggcagaggcaggcagatctctgagttcgaggccagcctgatctacagagtgagttctaggacagccagggctacacagagaaccctgtctcaaaaaacaacaacaaaacagacaaaataaacaacagaaagatgttgatacctgggtcacaccctagggactctggctgaattaattcaggatagtgtagacattccactgtggcatccaaggttagaaccagtgttgtcttgttcacctatgttttccgaggaccctaggctagattgcagatgtatagggatggttactattaggggcatttcccattatttggtggctgatcccttgctagtcaagtcttcagaattcccagggtggtgacgagggccaatcactagaacaaggtgaggttggcttgtggaatcacatccttctctctgggaggatctccaggtcagcctgagaggaacaagacttgtgagaggattctgggattgtgttccagtgctgttcccaggtggaaattagcctctgtacggggctggtaccctcttgatcacggcatttcaaacaggaacactgagtttttttttttttttccagcactgtattcccagtcttaaggcccacgtgggcccaagttcatgaacatttgccttccccgccctctgttctctgccaggccgagctgctattccaggtacaacctcagatcaattctgcaaatattatcggaaatctattctctgacaagcgccgtactaggaacccggaggtatgtgataattgttttgtttatcaacagtgttcttggaatgttaagactgaacaagttatcgcttctccaaagttcaggtgcttggcctataaaatgtgatctgtgtggacagacttcagtgccagtgaatcaaaacccttagaacagtggctcttagccttagaccacaacccctctagacgtcaaacaaccctttcataggggtcccatatcataaatcctgcacatcagatgtttacattatgattcataacagtagcacaattacagttatgaagtagcaatggaaataattttatggttggggggtcagcacaacatgatgaactgtactagagggctgcagcattgggaaggttgagaaccactggagtagaaggatgcctggcctgtattaagtacctaataaatatcagccaatgttgtttttaagatcgttgttgactaccatgtgagcatttgtgttcacttgttgttcactactccccggtggagggacttggtgggaaggcagaaccctgaagatgacattaagggccttgtaaagcagaccaagggggagtgtttgcccctagtgttgtgtggtgtaacaactagaaggtgctgcctttgaagtagagaagcagaaaggtgaacaggagagagagagacacacagagctgaggtcatgcaggctgtgaaaccgactatggattggtctctgacccagtgatgccacttccaggttcatgggcaagtaagtccacaaaaagacttgtttatgaatgctcataacttctcttgtaatagctaagcactaaaaacaaatatatgttaaccaatagcatccataaacaaactatatggcatcccaaccattcagtaacgctacggtaagccataaacgattctaacaatcagaatgctaaaatagaagctgtatatgacatatagaagactgtatactatattattacacctagacaacattttgtgtaagacagatttctggaaaatggagtatgtgtatcactaggccaaagaataagaaactgtcaggtgttttgttgttagacagcttacgtagggtgtgtgtgattgcttcactggtgtttggcagaattcacccatggaatcttttgaacttgcttcagtacaaacagggctatacaaactgtccatttcttcttgagtaagctctgggaactgtgcattttactatttgtggtggtcttttgcaggttgttgtcttagaatcatcttccagtttcccagctgctacagtgatcatctttttttttttaaagatttatttattattatatgtaagtacactgtagctgtcttcagatataccagaagagggcatcagatctcgttacggatggttatgagccaccatgtggttgctgggatttgaactctggaccttcggaagagcagtcaggtgctcttacccactgagccatctcaccagccccgtgatcatctttttaaattaaccttttatgctattttgtagtgtgtgtgtgtgcgtgtgtgtgtgtgtgtgtgtgtgttgtgtgcatgcacacattttgtatatgtgtgcaaatgtttatatgcttgggtgtgcgtgcgtgcgtgtgcgtgtgtgtgtgcgcgtgtgcgtgtgtgtgtgagtgtgtgcacatgcatgaggaatggaggttgaagtcaagtttcctgctcagttgctctccatcttactttgtgagacatggtctctcactattatggtttgaataagaatggtccccatagactcaggtacttgaatacttggttgtagagatgtttagtggggtaaaacagccttgttggaagaaatatgtcattggggacagttttgagggttcatagcttcatccgtacatttttgctttctactttgtgtttacagttgaagctatgatttcttagcttcctgttttggtcttctgataccatttctcctcctctgggactgtagcccctacataaactcttccttctttaagttatggtgttttggtcacagcaacagagaagtaaccaatacgctcactgctcctgaagcttagcagtttggcctgcctgcatggccaacacattccagggacccttctttctctgtgcttcaccgcttgccccagtgcaggggtcatacacgtacgctgtggtgcttttctctgcgtgctgggatccaaactcagcttctcctgcttgcatggcaagaaccgtccaactgagccacttccccgatccatacagcagcattattcttgtcaagtctgcagctggaaatcaacagagcacaatacaactaacccagttgacaataaggatgtggcagggcaaagcttgggagctctggcatggtcgaaggcattgtaggctgtgggcttaaagcattacattgaggctgacaagtaatgcccgatgactttgacagacaaatttgcctatcttaagcatgagcttttaaatgggagtgggaaagagagaaaagcttgttcaaaggaaatagcaattaaagatgttcccagcaagttgggaaaagctaaaggaaaaggcagaatttgtgaccacgatgtctagagagctatttgtaaagatttagtttgaattttgtgtgtgtgtgtgtgtgtgtgtgtgtgtgtgtgtgtgtgtgtgcgcgcgcagagccccaacgaagccaaaaagagagtgttgaatccccaagagctggagccccaggtaattgtgagccatcttatacaggtcctaggagccaaactctaaagagatctgtgtgttgagtgtatgtttcacaagaaacatactttcatgtttgttttagaatttttggcatatggatactcacgtacttgttgtctgggagtatattaaaacaaaacagaaaagatttgacttttcccaagaatattcctagtaatttctggggaagccaggtgttgtggcttaggcctgtattctcaacattctggacgttggcagaggttgatttagtttgtttgctttttagaattccacgactaagccaggaattgtgtttgttgtttattgatactcatttcttttgcctgcctcgattaccataccattgcagcaaccagacctacagtgtgagagcctgtctcagaaaacaaacagaaaaacaaacaaacaaacatcttttggagaggctgaagagatggctcatgggttaagagcacttgctgctcttgcagaagacctgggttcagttctgagcacctacctggtggctcacatccatctgttactccagttccagagcatctgatccctccgggcaccagggacccttagtattcatatatatgcatgcagacaaacactcatacatgtaaaataaatggctttaaagccctttgaacttgcacttataattattgaaatgacctctattaaaaagtaactttctctcccaacttctctcccatgtaaaatgctacctttgtacacactacatcactgttctaaaacaaatctgcttgcagctacagaactgcctaattaatggactttagcttagttttgcttaccggtgaagtaggttggtttttcaacagtcatcaaagggtggttacaaaaacaggtatctagatgacagtgtagtggtggagagagatggcaaccattatataaaggtagatggatgttcttggaccacctttctttatggtgagacaggaatgttataactttaccatgctaactaagatatcagagaagactgtattcatatgccatcatccggctttctcttggagaaggcatacactgctttccttgtggtgtgtgtggagctagctgcagcttgtggggcctgcttttttggctctgccacatgttgacagctaaagttagtctcacccacgattggctgatctggttcggttgcttctcagaatcccatgactaagccaggaatagcattttgctgtttattgatacgcatttcttttgcctgtctcgattaccacaccatcgcggcagactttggtctttgtgaacctgtctggaaagtcaaatatatctagaggcctagggctaatgacaccatcaactggaggttatggaacagaagttggaggtaactcaaatgagaagaaaacgtgtgtgtgtgtgtgtgtgtgtgtgtgtgtgtgtgtgtgtgtgtgtacaaacttacatgtgtgctagtacacatgagtagaggccaacctctggtttgattccttgtacactgtcaatctggttatttttgagacagggttggtctctcattggcacagaactcatcaagtaggtttgtctgggttgccagtgaaccccaagaactcccctgtgaagtggaaacttaagggttctttggagagtcagttgtgttggatggtgttttgctgggacaaacacgtgaaggagtctttgggggcacatgtgtgtgtgtgtgtgtgtgtgtgtgtgtgtgtgtgtgtgtgtgtgtcaaactcaggctcttgtgcttacaaggcaaacattttactgaatgaaccatccctccagcctgagaagaaagcttaatagcacactcaacctgaccccctttttcataacacttaacgagaaagcgaaagtgtagaggaagtctacagagatggctcagtacataaaacccttgctggacaagatggcgagccggtttggtccctggaactcacataaataaatgtggaaggagagagctgactcctctgaactccacacgtgcaccatggcacgtgcactggtgttccaaacagcagcagcaacagcagcggcagcatactagtatctaccaagggtcttgatcagggtcccctcttctgtgatgttagctgagatcttccaaagtggtcggaacgatacttcccaagtgtctacaaagcttctctttgtgttctcccacgaggtctcaccccttttggaattatccttagactgaggccctctcacttacactgtgacctatttaaggggtgaacccaaaagtccaggacgttgaaagaactcacgtgggtttgaggatcaggtgatcttttgctctttacccgattctacatgtagtgggggggtcagactcacaagggatcaaggaaaaacttcacgagagccaggctcctttgagtcacaggcccaagagtggagtgaatcacaagagtaagccaagaggcacatcaaagtgtaagatgaagagttaaagggatggaagccagaaggaagataagaaaaaggtttccatttcctgacttaaggatgcactccatctattttggttgttcttttttctcatctgaagtgggggcctactatgtcggggggggggctgtttaaagtactaggggtatagcaatggggacacagaccaagtgtctactcatattctcgtggggggaaaaagacaaacataagaaacgaacagctattgtcatgccaagtatcagcaaaggcataggtaaaaagtgaagccagaaagaaagaagcaatctccaacaggacccaagcgagaaagcttttctgaccaaaggtctgagctcagtgaacgccttatgggaaggtgaagaaaggacaatggcctcaaggcaagatggccatattgaggaaaaaggtgacacaaggttagaacaccttggggaagaacaaaggacataaaacctggcactggcaacaatcatcaccttcccagaactgattgtggctgatgcacctttgacagtgcagttcaagcgtgtcaattcccaactgaaggcaacctctgtttctcagaagtacttttagagtcattccgctcagcccttgtaatctgtgctctcaccagaggctaacaggcctggggagtcacagtgaaccttgaggagactttaaaaatagggtctcctaaggtagccctagttcacctggagctcactatgtagagcaggctggcttcacactttggtggattgtcttgcctctgttttctgagggctgggatcaaaggtacagagaagaataaagtaagccagctgtgagaatccagtctcttaaacacagagaatttcacttctactgacaaatacgctccctcccactactcctgatacaaccagtcttttaaaatgtctttgaaattacatgtatgtatgtatgtatgtatgtatgtatgtatgtatttatttgtttgtttgtttgtttgtttgtttgtatctagtgggtgtacgtgtgtgcagtggtacaaacctgccaaaggatgtcagagaacatccgtttgggagtttgtactctctccactgtgtgggactcaaggatagaactcagttgtcaggttccatggtaagtacctgcagccactgagctgtctcactggcttgatttttttttttttttttttgagacggtgtttctctgtatagctctggctgtcctggaactcactttgtagaccaggctagcctcaaactcagaaatccacctgcctctctggcttgatatttaaaactttggggctttctcctatttccccactatcaatagtgagttatttctccaccgtaagataaaaccacaagtgttacaaaaggcaactcctgtccatgctggagaggtcccaagatgggtgaggactgtggccaatgggagggccatgtgctggccaaagaagctagccactactctatgtctgctgatcctgttttgtgggagtgggacctcacatcggcagatcatatacttgggcaaaagaggggattaatctggatataccaggggcataaaatctatagagttttaatctctttctgcttttgaatgccggcacaccaaccaatcaaccaacctgaggaagccaacccataggcaagtggtttgtggtctctatagttacaagaatctctgagagacttgatttcaatagcattaacaacatccatccatcaacatccacttttgtgggaaaatccactatgttcttaggtctcagaagtctggaggatgggttccacctgacctacttctcctgattccacaaccctgatctagggcactgattttagtggcatcctcctcccttcctccctaacaagtcctctgttgtggggatggcacaagtaggatattatgaatggagtatgctattaagaagcgcatggtagaaagtgtgagatgccttggcatagaagatgactcctgtctgcatcttctcaggactctacactccttcccctaaatctctcacacttaggccaaccacagcataggaatgcctcacctgcagttacagaaacccaaatcaaaccaggccaaggaagagtaaatttatcagttcccatacccaagacatacagcgtcatacaggttggaattccaacacacggggtcctttgtccctccagcccctgttgccttccttctttgatgtggctaaaaacaagttgacccacctggttatcattgctgtttctcctgaagcatttatactcaaagacaaggatctagttgcctaaaggggttgtgacactagacaaggccttgtgtcccagggcatgagtcactcctgtgaataagccaggcttacatatgctctagaaaagagaacagtcccagcgtcagagagagctgaagatacactgcatgctggctgtacaaatgtgagacgtggaacctttgaagaagagggccagaggataattaaatacgtgatttctgtctacatgtacgccagactcatatcagatttagttgccaaagatcatccattgttcacccaacttctgtaagctggtagaagcttgccaactccagtactagcgtactgtcattgcagaacaaacatatccagttggtacactttgattgggtgttcaagcccaggacactcctcaatgcaggcaatgaaagcagctctctagttctgtgggcaacactcctgtgccctcgcagggtagaaccatagtagggatttgccatagtcagtatgtcatccaactgaacagacatgttcttaggcatccagtaatagaattatatccctctttgaccctctataagttttatttatttgtttaaaaattctattctttaggtgtgaggtgttttgtctggatgtatgtttctgcattgtgttcatgcctactcccctcagaagccagaaggtggcacttggtcccctgaaactggggttacaaatggttgtaagccaccatgtgggtgctgagaattgaagccaggtcctctggaagagcagccagtgctcttaaacactgacctatgtctctagctgtaacaccctgtaaattttaaagttgaaccagaactccctggagttcttgggcagccaccgatggaagtttgtggtgagaatggtgtgtgtgtgtgtgtgtgtgtgtgtgtgtgtgtgtgtgtgatcatttcattccatgtacgtgaaagtaagacaagcttctccatactgagcacaaccaaactctctgagagtagaagggcaagtgaaataccagccagtccttagaaagaatgcactaagtgccaaagctcttttcatggattattttaattgtcagatatcttgtggggcaacatatctgttcagtgggcaccaggcacaacatccccgtaatataggttctatcaccgtctctctaacttgccaaaggtaacatatataaaaaattgacagtttacacctgggaagtgcaatcataaagccttgatgattcattcattcattcattcattcattcattcattcattcttacttacactccttaatcagtgatgtccagtgcctcctacatgttaaggatggttcttggtgtgcaagcagcagccacatttgtgagcaatggaaggaagagtacacgatgctcacattctagaagaaaagaaatagtgtgagttccacaggtacacgaaattttatttaagttggtgtggcagcttacacctttcatgcctgtgtttgggaagccgaggcaggaggattcccttgagtatgtggccagtttgggctactgagtgaaaccttgatccaaaaggccctttgtccccccaaataaaacatcaaaacagtgaatagcgttagtgcctagaagagggttgtgcgtgtgtgtgtttgtgtgttgtgtgtgtgtgtaagattctaaattgggtgtcgagtcttgctaagaaggcaacattaaataaagatctaagggggactggcgagatggcttagcaggtaagagcactgactgcttttctgaagatcctgagttcaaatcccagcaaccacatggtggctcatgagatctgacaccctcttttggtgcgtctgaagtcagctacagtgtacttatgtaataataagaaataaatctttgagccggagcaagcagggactgagcgagcagaggtcctaaaattcaattcccaacaaccacatgaaggctcacaaccatctgaacagccatagtgtactcacatacataaataaataaattttggaaaaaaaaaaagatgtaaggaatgtactcaggagtaaaccataaagatgtctgaatgaacacaagtcgtggaacagacaattggaccagaagcagcagcagaagagcattttaggaaaggcaaggagtccagaatgcctgagactgaggctgactggggcaagagtgggctatgagtataaataggcctgggactcaagggtgtaggaaacaagatccgaaaggtaagtgggaatggatcctgaaagaccctgcaagtggcagggcttcgtcttttatttggctgcaatgtagtcatttgggttgggccagaagaaaacaacccagtttccacacgtgaactcttgcttctctgtcgaggagaggctgcaaaggggcgaggaagccatggaagagacacagcagtgaccggggcagaggttaggctagtttgtcccggtgtgcactagatgtgtggcaagcacttcaagtctaagattgttgtgaaacctcgagtggaaggattggtcgacgggtgtgtatgggagcaattggtcgtgtgatgccctgagccttttagccctagcgactgaactgggatccctggcaggagaggcagggcaggtgcagaggaacagcatgcttttgttctaagtgggaggggttatcagggctcagttcagggatgtttaattagaaatacctattaggcgtctccaaaggtgatgctgagagctcaggagaggggtccttcaatgccgaagttcaaggtcaacaagatacgctctacttcagggcaactgaagacattgattcacacatgactttggcaaaatgatgattatcaaacacacaaaccaaaaccaaaataaataaataaataaacaaataaataaacccacacacaaaaaaactagattaagaatgtcagatttaaaaatccacccctattctgctaccctcaaatacttgatttgctttctctatattccctcctggttttgcccactggtacacataattgcacaatgccgttctaccctatttgcttgccaggaactcatagacatttcctaagtggctcctacagtgctcaaagaggatttgaaaggctgacaaaatgtagggcatggaataggctagaaagaaaagttgaaaaatcctaaatagcttggtgacctacggtaagctgtgtgcctaccgtaatctttgtggccagtgactccttgtttaggagactgaactttgagatgaatgagggcaagccaccttgcactcagtcagggagagattctagaaaaagagggtctgtgcaaaggcccaggagggagaaaaaaacaaacaaacaacaacaaaaaaaaacacatgctatggtttgaatggaaaaatatcccatgaaggcttatgtatttgagtcacttcttagctggtagcactcacttttgaaggctgtaaagccttcaatctgtgggtcctacccctttggcaaaccttgatctccaaagttacataagcacaggcacacacttccacttcctctgaggttttctaccaagaaaggatcaaccattcataaaatgttggtcctagtgaaccctgcacattgtagaggcttaaaaagtttaatttgggcctccaactcactacacaggaactccagcgggatccgcctgtccgttcatgctaacctttcaccgacatcttgtttttaagtttacagaaaacgttagggacctaaagaaggtcattacattacagtacattacagtacaacagaagttacaaagtagcaatgaggggcttggggatttagctcagtgctagagcgcttgcctagcaagtgcaagaccctaggttcggtcctcagctctgaaaaatcaaaacaaaacaaaacaaagtagcaatgataataattttatggttgaggggtcaccatgatatgaggaactgtattaaacggtcgctgcattagggaggatgaggaccactgtggggctcagctgaaggaagtgagttgctggtgtagggcaccggagtgctagatgtaaaccggtttcctgtctcccttctaaggctgactgcaccactaattcctgcctcccgtggagggtgctttccaggctccaagccttcctgccatgttggaatgtgtcctgtgaaccatgaaccgagatcaatctttcctcccttccatcacctctgccaggtggtttggtcatagtactcagtagagtaaggaggctggaagatttactacacctgacaaagaaaaattaatctgtatgatctcaaaaaaaaaaaaaaaaaaaacaccaccaccaacaacaaaaaaaccaacaaaaaaccaaaaccctttaggagtgcagaagcacaggcacacacttccacttcctctgaggttttctaccaagaaaggatcaaccattcataaaacgttggtcttagttatccctgcacattgtagaggcttaaaaagtttaacttgggcctccaactcactacacagaactccagagggatccgcctgtccgttcatgctaacctttcaccgacatcttgtttttaagtttacagaaaacgttagggacctaaagaaggtaagcatcctgctaagttactccctggctttacacaggctttctaaaacttgagtaagaggcatccttcccatcaaagattccaggaaaacagcctcccccctccgcggccacacatacgaatctatcgctgacaaagcccctgtaagctggcttatgtcctcccctcgcgttcaccattctgtaagtgcatagaattatttaagaggaaaaaaattactgtggataaaaattggttcggggccttggaattggccggtcgtgttgtgtttccttccagggccggcaggcggggcaccaggcaaggcttggaagccgcgcctctctcaacctctcctggccacccttgcccaacttccccatagacacagcttcaactaaaagtggccattgacctttcaagcttttgagcagtggggcaacagaacagtatttcaaagaaaaatggttatcgaaatttcgaatccggttttcccatgagtgttttttttttgtttttgtttttctgttaaaaaaaaaaaaagtaggtcacattcaaagtgggtcacgtttcaggagccggcgtgcctggatgccggcgcggaggctaggtggcctcttacagagtgggaggtgagggtcccaataggaaagaagtactgggatcaatacgaactccgggtccctggctttgcaaggattcacagagacaaacgcaccaggcctgtgaccccgcaccccacccgggcacaggtaagggcacctcctctgtagggtggccagggtgggtctcccgaagggcaagcaggagttgagctgaggaggaaaggagaagctgggcaaggctgatgcaggggactaccagttggagctccaggggggagggattgagggcagtctgcgcagctttaaggaggcgctcagctcgtctctttcctggccttctaggatgctggcggaggggacagtctctggttcgcttcccgaggtgcccgggagtggtagtcgacctgggcagtggcgtgctagctctagctctgtgtgtgtcttagagagggagggacggacatctgagccccgcccccttcccgcacgctggtcctgcatcccacatggaggagaggagggtcgcgtctggcaggcgcacagcggggtggatggctggcctaaaggttccctcctacgtggagggctggggagaagaggggctgctattcgcgggaccgaggtgctcagctgttgcagacacaggggcaggtactggtggcttaataggcattggctggggacttctccttgttcccgagcaccccgaggtgcagggtcagaggagggcggagtcgcaggcttccaccccgcagccaccagcaccagcacccgcaccggctctctccacccggctcccttgaagcctgcgcattagcggccggggcctctttaaagcgctggcgggggctgcggtcacgtgaggcggattcctggaaagttcctggaaagcggcctccgccgcggccgggcggggcgcgaggggcgggaggcggggagcgagggaggcgcgtcgggctgggaagtcgcgcgcacactcggctccggggacagacggttaactcttgccaagtctcgccgcctctgcggctcccgggccttgggcttcccccctgaagcatgagcctttcctcccgcagccgccaacgctgcgcgggtctcggacagtgcgcgccgggactccaggcgcgcgccctcaagatcccttgtgcccggagcccggaagcttgcggcaggtaccgctcgcgaagcccgaaggttccgcccggggggacagtggccgggagggcggcggggtgcgagcacgggggcggcggcggaccgcctgggcgtccgcagtttagggcgccccgggagagttcaagtcggggctctgccccatccggactcaactgcctcctctctcccgggttccttctcggtctcgggaaattttccgagcacccccaccccccaacaactgctacccaaatttataatcctaataacctgatctcccgctcctccccgccagcctccgcccttgctcccccaccccaccccttctctttctcccatctcctccgcttcaactggagggaaacccggcactggcgagcaggggtgtcagcctggggcggagaggggggggggaagctaggcgacgatccctgggatttttgtctgcctttggcgcagaaaaactcggttgcttttactgagcgcagagccgattgcatccccaggcatctccttccacaaataaacgtcacccggggaactcagacggacacccctccttgccccctggctcccccgccccttgtccgctggggaggctgcctagtgcggaggcggcagtcgcggcggtggaggtaagacctcagtcccagttgatggcatggcccgctgcgctcgctgttgcgggctcagccccggcctcatttggagctccggcgggggctgcacgctccggccgattcctcgacagcgcccgcggcggcagccgcaggagccgcggtccgcgttttggagcgaccgccgctgagccccccatcctcgtctggagcgtgctccaggaagcggcaggagtgggggtgaggccgcctccgaggcagggatgcagcggctggcgcgccgctagcgcaccgcagcaccctcggctggcgacccaggagccctgcggcgctttagggcgtggaaccaggttttgccggatgcatcctcccaagggccctggggctgctcgaaatgtaagatggaaatgccaagtgcagagaactgcccggttctttgtgtaatgttttcccccccacccccaccccccacttgcccatgacaaaggcctatccatccggacccgcaggtgactgtttcctgggctgcctgtgtgtaattccagcacacagttcttcggcgggaaaacaccttgtttactctcatcctgtctccctcctcacccctctactccggccaactttagtgtcttggatctctgccctttttacccgtctttccccagagttgggcagggcgttagctggatgctcggggttaaatggtacagaacacgcaggcggaggagtccctgggattttccacgtgtctgtttacccacccccacctcggccgtaggggttcagcccagactgacccaatctctgttccattgtttcttcacaggcgatctgtgggtgacagtgtctgcgagagactttgccacaccattctgccggaatttggagaaaaagaaccagccgcttccagtcccctccccctccgccaccatttcggacaccctgcacactctcgttttggggtaccctgtgacttccaggcagcacgcgaggtccactggccccagctcgggcgaccagctgtctgggacgtgttgactcatctcccatgaccctgcggtgcctggagccctccgggaatggagcggacaggacgcggagccagtgggggaccgcggggttgccggaggaacagtcccccgaggcggcgcgtctggcgaaagccctgcgcgagctcagtcaaacaggtagggagctggcggctggcgaggagtgcgaaacggggcgtccccatccccaccctacccaaggcggtggcggagagcgcggctgggacgcgggcccaggttgggggcactgaaagcgatggaactactactcctcgcgtccggtctccgctcggggaaccgcagagagggatgcccggatcttaggtgaccacaaaagcaaagtggagggacgctgaggcttgggcaagggccgggagcgagctgggctcattttggaaatgttcccccagcaccttggagcctaggctgctttcagccggagctcccgctcgctccggcgtgggagaaaagcggccagcgcctctcttaactggcccggtgcgcgggcggccagtgggctgtgctgcctcctgtctgggctgtgagcgctcccgagagcacagccgcctctgccgcagcccgggttgatggcagccaagttcagactgtatgaatcgcagctgctgggggtggggggtagcctgggccgagtgcagcctgctccccgcaatgcggaaagcaccctacatctgaaagcaaagaagagaaatttatattttctcccaatagctcgaaaacaatttgagtcttaaaaaatctggcttctgaaaacttacctttgaggcaagacaacttttgtagcagtagatcttgggagaggagaaaaagttccagtctttcctttcggccctgggctttccttgggaaagtttcccggtaatatttttttgttgcggggggggggggtggcgagaggggagctgtcggctgaaacggaggggggcacattgttcaaagttattaaacgaagtatcttgagttacttttgtaagtgaggtttagaatctggtcaagatgaatcaaatggagatttcagagagcaggggttattttgatccagggcaaagtccaaaagagtatagtgaagactgtaaactgtttctgctcttcctgggaaactgagctagttgtaatcaaagcagtcaacaggagtgcctcctagggcttctaacggaggctaaatgttacaagttctttgggggtaggttagagggctaccagccagtcaaaaaaaagttgcttctgtttttaatggaattatcggagataagctttccactttgtcccctaacttctaatttagttctgatttacttaggtttttgtttcagttaaactgtactgaaaggtttttttttttttttttttctttgtcagccaatatgtctgtcatattgcaaaagttcttttagctcattaggagaaaaccttaacataatttaaagaaaagctacagaaaatcatttgaaaagaaaaaaattgctttacagttgtgcctagaatggacttaagtttttattaaatacttacccagagatttgtggtaggccttggtaaactttaactcacaggctttaaaaaaaaaaaaaaaaggtgtaacaagagaaattagttgagcactgtggtacaggtttataaatcccaagacttgggaggtgagtgaagaagaacaagaaggttcaaggttatccttggctacaaagtaaaattgaggccagcctgggctacaggctgccctgtctcaaacaaagcaaaccgactagaaaaacgactgccaagtacagaccatactctaaaaattcttaataataactatttcactttctcttctttttcttttttgaatgaaaaaccccaggatggtactggggaagtatgactgttaatgaagccaaagagaaattaaaagaggctccagaaggaactttcttgattagagatagttcgcattcagactacctactaactatatccgttaagacgtcagctggaccgactaacctgcggattgagtaccaagatgggaaattcagattggattctatcatatgtgtcaagtccaagcttaaacagtttgacagtgtggttcatctgattgactactatgtccagatgtgcaaggataaacggacaggcccagaagccccacggaatgggactgttcacctgtacctgaccaaacctctgtatacatcagcacccactctgcagcatttctgtcgactcgccattaacaaatgtaccggtacgatctggggactgcctttaccaacaagactaaaagattacttggaagaatataaattccaggtataagtatttctctctctttttcgtttttttttaaaaaaaaaaaaaacacatgcctcatatagactatctccgaatgcagctatgtgaaagagaacccagaggccctcctctggataactgcgcagaattctctcttaaggacagttgggctcagtctaacttaaaggtgtgaagatgtagctaggtattttaaagttccccttaggtagttttagctgaatgatgctttctttcctatggctgctcaagatcaaatggcccttttaaatgaaacaaaacaaaacaaaacaaaacaaaacaaaaacaaaatgtcccaaggaaaggcaagagaatattcctgtcagaatgacttgcctttgttttttgggttcctatgcactgggtcaaaagtccaagctccataggagagaaagaaaggcttccatttccaggaggacagctgaaggagggaaagaccctggctgacccaggcttcagctccacttctagacgcctggggttcagtctgtgttagaacctgttatagtttgcatcctgatgtatctagtaggagttccgttaagctgaccatgcttgtatttatccctcgtcttatgcaactaatcaaatcaaccaaaaaaaggaaaaaaaaaaaaaaaaaagaaacgaaaaaagaaccatcaccatgagatcctgtatttgtctttttttactacacgtatgacctcccccgtgagtgagtactgtagtcctccatctcaaggcagccttacttcagacacatttcaaactggtgcaaacagaaaagacttctctcttttcttctgaggctaaagacaagaatgtcacgctatacaggtgcaactcaatccttgaaaacagaaaccaatgcagacagagacattttaccccttgatgtagctgtgagtcccaacctagtgccattgtttttatttttatttttatttttggaaatggctttagaactttccaagttatccttgaattgtctgaccacggacatcaacagctgcctcccttctaccatgtagaatcctatgacttaacttttcttccagatatagaggggtacctgcctgtttttcaaagtgtttatttactgctgttactatttgattagaatgtatcaaataaaaacaaacctgacttttacaagttgcactcattactttgagttgtaggtgtacatttccatgctaataaaaggtcgccataaaaactcattatcaagtgaaataaactaagcaatcagctcagggtagaacattaactcgcttgcctccaaataaggcccacacctgctctatgtgttttagaaagcatggttcacaggctaggaatcgtcaagacagcctgatcatgtgcaggccggatgggcacaatccttgtgcatttcaaaagcaatggtttagaagcgataaaagttacgtcagggtctaaactctaacaagttccgcagccgctttctcttggccacccagtctcacgactgctgtagcatgccatcttctctagagtctagacactatgcctcttgccgccctgtacatgtttcctggccgggccgtaggttcctgtgtgtccagggtgaaaggagaacctggggcgtcatgtgcacgctctaagtgaataggaaattataaaagtgcagaataatagaactgacttaccttgcagggtttgaagtccccagttttacaccaggaaggaaacattaagtttatccaacctggatggattgctgggtgtggcttgggaagagcctgcttcgctctgctgggtggtggggcaatactaggcttcccgctaggatacttagatctcccttttgcacactgatgatgatggttctctggtagaacgcttgggctagcaaggggctttgtggaatccttttcaggtctccctgctgttcctcaggtattgggagtgaggaggcagtcagaagaccctgtgcctgtggagttatgacaagctcccgagtgttgcgttcagcgcctgcaggtgtgtgtgtattgggagcccagattcactgcttggggctgtgatatggatcaccttatctaactctagtcctgatggcaaggaagttgataggcatcaggggacagttttgttttgtttttgttttcttgctttatagtttttaatatatttactgagttccttgtgtgccagcctctgactcaatacttcataatatctcatttgatcctcggaaggaccaaaagagcaaagtccaggatttatgggaagtgaatagttccacactgatccagttaacaagttagagcaggctgtaatagcagtctttttgctgcggcctcaaccagactagtgcagatactgtaattagtgttgcgtcctctctcgctttaaaaacattttcaagaagtggtttcttggtgcatgtgtgtatgtgtatgcatgtgccatgtcatatatgtgggaggtgtggcacagcttctccgttcttgcctctcgctgcgtgggctccagggattggacctcagtctttaccgacaagcacccttacccattgagacatcttgtcagccctccagtcagtctggccaatggcttttttttttttgaagatccctgaaataagtggtaaagtgggggtggggagggagtttgtccccttcctgggtgactactaaatgatgccaggtatcactgactgtcccatctaacaacagaaacaaaactggattcacccaaggtgtcctcaacagaggctggaaaatttctctttcactgttgtttttctatggggggtggtgtgaagcattagtaaggacatttattattgagattctaattgttgctgttcttgtggcctgtcctgtgctctgtcgcaggatttgtgtatccacccccgacttcagtgactgctatgagtttctgttcagaggacgcagaggtgaaggagcgtatgtcatcccatctaaagttaccaacacagataacagatgtaatgacatctgctttctttttagaaacagggacccccagtttgtgtgcgcttggaggtcttgcttagtgttattagtatgaaggttttgacttcatcgtaattacatcattcaaataggtgacagaaagggactgttggttgttccacacggtttattttcttgggaagcctttctttcccctgcttttagaaaattgtaccctgcttggcggagggtaggagacagacacgtcatcaagtaatccaagggatggaatgtcccgagagcagactatgcccttctggttgtgggtttgggcacagggcaggagggggctgtggctctaacagctgggccgaagcctcactggctcccagaagtcctgtccatcttctagacctctacccagaatgtggctctgggcctgtcattccctcagaggctctgcgttctcctcatccagttgttaactccctagaatcctggagtccggaacacactgtttgggtcactcagcccaggtcctttataggaaccagaacatttcagattcagggactagaaatctagtcagcaaatgggcaacatacaaacccagagcttaggtccggtggaagctccacccttctgccctcccttcaaaccgcctgtgcccttctttgctgcagttactgtaacttaaaacttgcttcctctgacatgcaaaatcaggttttgggatgtcaccacagcaggatactttcaattcttagctcctgccccactctccaggattaccccttttgtcgtgatccactgtataatgagatatgtattaatttgaattctttagttctttttttaatcattttggagattgaacgtaggtctttccccacgcttggcaagcatcctaccgttgagccacatctccagtccatgtcaatgtctctctaatctgtttgctgtttgaaagccgaagtcctccggtccttgctgtgtggtgatctcatgacacgtctgccagatgtcacccacacatggccagggtgcccagctgactctactctcctgtgtttgcttaccagtagagtctgttttggcttttgcctcctcttacatgcaggtagctcctgccttactctctcctgctcttcccacgatgctgtctttttagatggtcgattagagaagtcctgggtggctgtatgatgggccagcgaaggatgggaattcaagtctacttgaattaggtaaactgacagatttagggtccttaggattaagtctgtgtctgtttctctttagttctcttcaggatttaaaaaccaaagccagttcctaacaccacatttcaacactttaaaaaaaaaaaaaaaaaaaaaacttgtttatttaaacaaccgtaggctccttacttgctagtttatgctctattgggaaggaagaaagacagcccttctttagcttgtttgttgctgagggcaatccttgcaccttcggtttggtcttctcattctcttctgctgccctggaagattttctccagttttccctctatgtggtttcagagtaagtcaccttacctcgcactcagcttaagggacagctgttgttggagtcagcctctaaaagccccgtttgtcccaaatgcctgactagcgggtcagctgaagcagtcattgtggtcttcctacccaccctgtcctcagctctgtccacaagggaggtctgagctgccaagtctgacgggggactcacttccataaacatttactgagccataaaaataaaactgcttttatagacaactctcactttgaactccattcttcacttggagaagaaggcgctgcccctcgagcaggagcagtttgtgacgggttatacagcccgtctgtggcctcatctcagtgaggaacagagggaagggagactcaagccagagagagccttggtgcgagctaagaaaataacaccagctgccttcctcttctgtttcagcctaagttccttccagagagccccttcgctgcggcgaaataagacacatttgctagttaaatcatcacaggacttcatatatttttcctagactgtcccagtttccagtcatgttaagataaaaagatagcctttttgccaaatggtttttcccttctgttctttgggcagcccttttcctgttcagattttgatcttgtgttgctatgatctttcttagtctttcaggaaaaccctccccatgttgttttctgcccagggaagttgttttcccactttgactttcgtcacccagatgaactgatgaactgcgttcccttaggtagtagacggaatcgtgggtttggtcagaaagtaagtgtgttcttgttttgtgtattttatttacctacctgttctccattatgtggtgataaagggcggagagagtgcctgctgtcagacaaaccctctgcttcctctccgttcattctcactggaaccactgtcagaaaaatggcttcatgtcattattatttaagtatattgaaggcagtaatagggttgggcaaagaaaaaggggtgaagcctcactggtgtgatgaggggctcttccgagtctctcattaggtacccagggctctcaagactatgaccagtttatttctatcaccctgtgtaccaatccttgctcttgagctggggtaggattgaacagctttagcggaaaaaaaaattcttcttctaagacagggccttaggtatcctagactcgaattggaactcgatgtagagctaagggttatcctgaactcctgaccctcctgcctccgtctttcagctgctgggattacaggtatgtgcctgcctgtatcaagcctgttaatgcagtgaagccagggcttcctgggctccaggcaagttcttgaccaagtgagctactttcccggaaactggcaatcattgtcttcaaaattgtgttcctcttttatattggggagtgttaccttttcctggtggaccgggcgctttctgattcagcatctttttctcatccgttacagtgttatctgtagagtttagagttgcagagaatggatatccttcaagtctttatttttttttaatgatatattttatgtatgtgtgcatgtaatgtgtatgtacacacacacacacacacacacacacacacacacacacacacattcatgtagatacccagaaaagaccagaagaagatgtcagattatggttctgagctgctatgtgggagttgggaattgaattccggtcctctggaagagcagtaaatgctcctggtgtcagagccatctctcctgtccccatccacaaagtcttgggaccaaggcctaataaatcaaggtgttaaccttctatttatattcatttggtacctgttatattattcattaggaactcagggaagagtcacactctcacattatagaggccctcttaccttatgggaagagatagagaagacaggattcatatttattcaatagtctggtctgtctcatgccccattggttaatctccacaacagccaggagcattacagactccttttattgaaaataaaacagatgcttgaagatggaaactgtagcgcccagcaatactgccctacgactaggagtctgtacctgtatggagactatggaacacaacgcagggttatagctatgagtgacaccatgctctcctctcctcttagtctgataaagcattccttacatgagagaactggcttaggcttgtgctgtgtactgtccttctggactccctgggtggtaggacttagaggtgaagagtgagagatgtgtggcgggcaggcaggaagcaggtgcctgggagaggagtggagaggcagacaagatgttcaagtttgtcaccgggctcagatttgtcccagatttgttccagattaatttggagctctgggtctggaagctttctgtttgataccagcttccactctgggcgagctgagccaactctgccttttcaggaaagcagggagcagtggcacagtgggtgccattctgaactgggaatgggaagagactatttctagttgctttgtcttggaccaaacgccgagcttcttagaggctcagatactacatgtgtagaatgtagagcttgcagtactgatgtctacagtcagtctctttcaggaagttaccctcacctatgagcacatcaggatgggaggagacagaggggcaaactctatattttgttgggtggtctcagattgacttaagttttagcatagatttttgcctctatgctatcataggctctggcttatttggggaaagagattctctctaccctaaattgttttttcccttttcacagtcagagtcagtagactgtttttagtatggtaagaggaattttatgttgttttctgagccatgaatctttggagccctggcctgtattcagagtatagacttgggcttttagatcctggctgtgatggaggaggctctgatgctgggaaccgaactgtggccccggtcctctgcaaaagagcagcaagtgctcttagtcaccgagccatctctccagcccctaaccatcttttgtatttggtggtctactccctggctccatcaactgatactttgtttctggcctccttcccagctgggactataggtatacaccatcctataccactgatactttgtttctggcctcctgcccagcagaaactataggtatacaccctcctgtaccactgatactttgtttctggcctcctgcccagctgggactataggtatacaccatcctgtaccgttcctcctggatctgtcttaaagcaggggtgcccacttctgctcttgacacccacaatggttttggtgccctttgttgccagcaagagagaatcaggttgaaatttacttgctaatctgatagagatgacagctggtagagccttcgatgctgttttttcacagagtaagttcttgctttgcaacttgatgcaaatggaagttagtcaccaggagttgtaagcttggctttctctggaagctcaccttatctcctttctttctaactcatccactctaagggtgtctgttaagccagcagaaaatagactgatacagcaatcagggagagaatagaggaatgcaggcatcagatcacttagcctggcatagtttaaagctcctggttgaagtcatgttgggcaggttggagaattcatcatgttcaaagagtgggaataaggcagcagcgattccaaaacagaccaactcttcagttcccaaaggaaattaatcctgtctttctacagtgtgaataattcaacacaaataaattatatactcactcacgttcagggattactcctttacctaagccacctattcagcattacctccctccctctttctttcttcctccctccctccctccctccatctttctccctccctccctccctccctccttccctccctcctctctctctctctctctctctctctctctctctctctctctcttccttccaagttttctttctttttttagatatgagtttcatgtggcacaggctaaccttgaactatgtagctgaggctggtcttgaactcgtgatctttctgtttttaatttcctaagcactgggattataggcatccttcaccatgcccactttttttttttttttaaatcagttttcaaccaacatgagcctttttaggtacatttcaactacatgggctttttttgttttaaatgataaattgatagctaatcactgatttttaaattgcttttgtgaggactatattctaattttcaacaactgagtcctacactgtctttttctacagaaggcagctgtgtatccagaataacaagctgtgtctcaacagtgagcctctactgaatttttaaattgctatgtctgacaaactaggacatggaaatgtacttactttaaagcagaattcaggttttctttagtgctacatctcaggttttctatactaacctgtattgaaaatttccacattgttgatattctccctcttcgtatttatctctctcacttgcttatttagttagatattttatccatctgcttattcacacgtcagcccacaatatttattaaacatctacttagatcatgcataaaacagggtcgtaggaaagttgaaagaacactctctgtccttaagcaatcacattccaaattacaggataggtcctgttgacatctttgagggatgagttgggagacgccagggcaatggttctcaactttcctgtgacactttaatacagttcctcatgttgtggcaactcccaatcataaaattatttagttactactactgtaattttgctattgttacaaattgtaatgtaaacatctctttttttttttgatggtcttaggtgattcctgtggaaggattgtttgacccccacccccaccatggggtcaatccccacagttgagaacctcgctctaagggatgcttaaagtcaaggatggtatatactgtgtctcatacacacagacacacagacacacacacagacacacacagacacacacagacacacacacacacacacagacacacacacacacacacacacacacacacctctataggaaggcttcacttataagtagacacagataagtaacaaggcaaagaataacatagaattcattatgctatcttcagatattggagttcactacctgacattttcagaccacagtcgatcgtagaccaatgaaactgagggatacgaagcctgggccaatgggagtgctggataatgcctctaaatctgtaggtgttaacccatgcagtcaggcaacataagtaaaagatatttttagaaggctgtgatgttctgaccacacacaggtagtctccctcattgcctcccagtcagtgtaacaggtgtttggtataaacgtcgttttagttacttatcgatactcaaatcacccccccccccccgggcgcgcatgcgcatgcgcaagctcagcctggtattttaatatggccttaaacaggtgcaagggtctggggccactctcaaatttccacatgggctaacgccctcccccgatactcctgaattattacttactaaaatctaaattccatcttgctaccttagacccaaatgagggaccctgggtccgctcttcccggttctttcgggcgtatgctccgcttctccagctctcaggcctgatttttctgtttccctggcaaaggattctaaatctgtccttttccctgggttcccttgcccatgaaatctaaagtcccacctccgtctcctgcctagccattagccacctgcaactttattttccaattagagccaacgggggcagggacccgaggcatcttcatcttacatgtagtcgtgcaaattcctgtgtaattggtaacccaattaaacaatataagcaataaaccaaatccataacatataagtgtgatattgcatcataagcaatctagagatgatttaaagtcggccctgaattacatacaaatgctctgcataaggtaaatatgcacggttaatgcataaggtaaatccaaggtttgggatgtcttgtccaagttcctggagccaaccaaccccactttgatacacaaagatacttgtagattggaaaaacagtgtaccctgtgagggaacacctagatttgtctgaggaaatctagggagaaagcagggaggaggtgatttctaacctgatgcatagaagatgactggcctggaggacagatcagcatgaaggttgtttgtttgtttgtttgcctgcctttcagaattgttaaatgcttacctgaaaacccttacaggcttttgagtgtagagtgatagcctcagacatgagatccagagcccttcaaccacagacctagacttgcaaggggcccagagctgaaatgttccgggccatgggcttgaggaggaaaagagtttccgtggtcattgtcggcatcttctcaacaagaaggagccgcccttcagatgtgagtctatcaacagaggcggcggaatgagcaaaggatgggagattatcacccgtgcaaatctggtgttccatatgagattacacttactgcttatagtacaaagtatgttctacacttaaaaaaaaaccctacccgggcgtggtggcgcacgcctttaatcccagcacttgggaggcagaggcaggcagatttctgagttcgaggccagtctgggctacagagtgagttccaggacagccagggctacacagggaaaccctgtcttgaaaaaccaaccaaccaaccaaccaacaaaccaacccaaaccctgaagatggatatctattgctctattttttatttttaaagattatactgacatcgctttcccttccttgcttacattcaaatgcatgggtttttttttatcactaacttgttacatacatacatgtatatctatacacacatacatgtatatctatacacacaaacacacacatatacacacacatatgtaatatttctaaagacataaatacaaccttcttagtctgcacagtgcaaattgtacatgtggtttcagggctgaccatttggtattggctaaccaattggtgcgatcctcccacgggaagactatccaggtctcagcttggttgcctgtgttcttcgtggagggtcgaggcctcctgggggtgaccatctttttatgctcatcacaccctttccttcctccctgttgccaccttttctaaaaatttcacccacacaatacatgtagtttgttttcatcagtggtcgagtatggaaagctgtactgaaaagcagtctccttggctctccccctgtctgtctgtctgtcctgacttttgttttatgatttctgaggcactctcatgtagcccaagctggctttgatcttcctgcatcaccaaggctggccttgaactcttccttccatttccttcatgtttcctatacaagcctggtctaacttaggcctacacctcttgaagctccatcctattgctcctgggctggagtgtaaacggtatgcagacagtgccccgtagtttgtagcccaactctactttttcatagtcgatgctgaataaatgactgtgtgaagacttattctttccaaagatagttcctgttttgaggtcactgtattatttatcaataccagttttagaagctgcagttgcaaataaataatgtattcacgtgagcttctgtgttgttttctgtgtaacgagttaaagaatgcatttaatggtacctcaagctggaagtagaaaagatggattagaaatgtcccgctcattgctttttatgcttttaaaatttttttattttattttatttttttaaactttggtttggttttcttttgctgtcgtgagcctgggtctcagcagaggttagtgtcagctcggctgcctgggctgtgaactgcagatgccactgtagctgagctctgggattggctcactgaggtccctcaccgtgcttcatgtgaggtccaggaatgtatagttttgcggtctgatatattttgatggttgccagataaaatcgatgtctggcacttttttctaggaaaaacacatttagacgtttccaagctgatttgtaggacttcatgtcattagaactttgtggcagaactttttctcaagtggctgaaaacataaaggaacttcagtctcgagggctgttcccagcatgtcctgggagtgccaaagccgagaggcggacaacggcctggattgtttagacggcctttcttcaaaaataactgagtatctggacttcttccaataaggaaaataacagctttagctactgacaccagattagtcccacaacttaggaaaaacggggtaccttttcctcaagtttctaataacatttcttagtctggctgagagggaggactcaggttagtcttgaaggtctgattgctgtttgctgttctattctgttttttgttgttgttgttttgttttgttttttttcaagaagagccgggttgggagaaacagactgttgttgaaagttagcctcccagttcaggcgagcaaatcacagtctttttcttcatttatgtcctaagtatcttggatgcgagttaagacgctattataaaggaatgaaacagagagagaggtagagagagagagagacagacagacagacagacagacagacagacagagacagacagagggaacctggtgatacacgcattactttttctttaaactccctggcttctctctaaggccagcgggtggatagcaagtctttacttgttggcagtacactgaagcctcttggaacaaaatgactattgaaaacaaaaaagcagcttcgtgagatacacttcagctagggagcccaggagtaaatattttagatttggaagaactttaaaaaaaaaaaaaaagctacagatcttctgaaagacttgccatttaattagtaggttaatgaggccttaggaccgaaaacttggtctggttaaagcacccacaaaaactcaagtagaacctggaagcaattcgaccttgatttacaaacatggtgaggactagggccagctttggctatttcgaggaactggatagggagagggatcaatcagggagaaagctgtgtgtgtgtgtgtgtgtgtgagagagagagagagagagagagagagagagagagagagagagagagagagagagagagagatctcctctccggtctccattctttctgcggggaggagggggggctacgctgtctggggctcgccctggctgagcagagggaagggctgaggtgccaccggctgacggctgacgcagaagacgttctttttctgcagccatctgggagtggcagctcctcctggcgtccaggcgccctgcgggtctcagggggtggggtggggtccttatgtcaggccacagctacagaggagatgtcaccaaatgcgcatttgcgctgagcgcacggcgccgctttcctctacagtgaatgggttaacaccttcttctacacccacccctctgcccccaccgtttacctcctacaaacagagttgggaacctggctgccactgtctgcaaacaaagcacctctcttgtttctgttaatccaaagtaaatataatcttctattagctagtttctcagttattctgacagcaacctactcggggttaaaaaaaatatctagctagttcagcaagtcactatgacggagggacgggactgcctacctccttccccactccatcccctaggacctcttatctatttgtaaaaaactatttcagaatgttctaatgtcatagaagcatctaattttaatcactttttaaaaagcacacacaagcagtatcatgcgtacatacattctgctctttaatttgcttctcaggtttgctgtttggggtctggatagcttttcatgtccttactcagatcccagctctttacatattccagcccatgaacacacttgttgacaggcttggtccccatcagtggacggttaggttgtctctgccctcacaaacaacagtgtattaaagcctctgggcttatgaatgttctgtgtgtttatgggcacaaacacacggagtaaatccctgcccctggaacttttttggtgacggggtactcacatgggacatgttagaaggttttcaaaggcgggtagtcctagcaatatttcagacataaataagttattatctttcacatctccagcctttaccaggctttcttgaaaacagttaatatttaaatgacacatttgttaccgagagcaaatcagcttgtgttaagttgctaattaagtgtctttaaagttaaatttcaagtcccaaacagaggtctctggagtgtgcaattctctgccagggcctttagaaactagcaagaagccagccgtgacaaactcatcccagtctccagggacatcaacggctgtggcatgtggctctggaaaactagctgctttgagaaactctagggtgggattgggaaggggtttgtttcatgtgtaagagtgttgtcaccaattaattcacttcagaaacactgactaaacacaaccatagcaaaagtttctcctccccctgcctttctttgtaccagcctcccgacaccagatgggagcccggttctaggaaccacaaaattaatttcctgccactgaaaggtgatccagcaaggggattagctttgcctgagggtggctatacactatatctagatcttgcccccaaagggatatttggcttgcttgtgagtttagtggctcaaagcgttccacctgcaccaaacggtccatttagctcctcacttgagttttctaggtagaaacattacagatgaaaccaggttccaatggatgagtcaagttttagaacttgggattcaagctgctattaaattgcattatcggcaatcctagtagcactgccccctcccccatagccttttagattatagtcaaccttgagggtgggggttgtgtagagtgttgacagttgtcataattcctcaaataaccacttgactgaaaaaaatggctattttaaaagcaaactccctcactctcaaaactcaaagacagtcacattgggatgggggggggggtgtctgggtggcatccaagaggaaaacaaagaaaaacaaacagcaaaactcaaaccaaaccagttaaaacaaaaagaaacttcccattctaggtccaaaattgtgctttcagatagaggagacaaatcaacagggctgaggaacctgctaataaaagcctctgatttcaaaccagtgtccagtaatacaggaggggcacattggaagagtgagggaggcgaaatgatgtcctgaaatagaatggtcctctcaacggtcaggaagcacctggggacttacttgcttagaaattcagacagaaattgtttctgcaattagtgggaaatgaggcttctaagcgccaacgcctttaatattttcatgcctttatctgccttttccatcaacgtgaattacagtgacaatgcattcaagttaataataccaaatgtaacttgggttgcaagggtggggcagatgatgtcaagctaggaaggacacttagactggacacttggctttaactccgaatctccctttcctgctttgcccagagcctgcacacccagcctgcggggctttcatttttacagctcctttcaagattctgtttaaaagtcgaaaagtgaaacaaagatgttttaattgttacaacgtctaccacctcttttaatttttttcttttttctttcttaacatccataaagactttagtccaggggttctcacccttcctaatgctgagaccctttaatacagttcctcatattgtggtgactcccccccaaccataaaattatttttgttgctactttatagctgcaattttgctactgttatgaatcacaatataaataactggtatgcaggatatgtggtatgggaccctatgaaagggtcactttcgtcccaccccgcaaggggtcaccaccacaggttgagaaacacctgctttagaagctattcttttccaaagtcctttactagcaactgaccagggttctttttttctttttctttttcttttttttacttattcactttactcccacttactgccccccttcttgtcaccccctcccacaatcctttccccttctcctctgagtgagtggggacacccccgtgtcccccacccccctatgacaagggttcttactaggatttttcctctccctaagaagtgttccaactcgtgtttctttagatacatcgttttcctttggcactctatcatgaaggcagttggtttgcttgagaactctgttgtttcagcactttagaatgtgaatccacagtcactgggttgctagaaaaagatgtcatgaatcagttttgagcactagaacgctggtagttaaggggagggcttgaacttgcataccattgatctttgcgttttaaataagagttaaaaaaaaaaaaaagtcctgtggttatgtaagcggtccttgaggcaggtttgactacattttcttcaaatgtcaaattgaataatccagtcagaagcacggggtcccaagtcttgtcagcagttctgaaagttaagatttattgcgacttctttcattgcctgggctttattacttttgaaaaatatgtgacggtattacccttggatttactggggttcttaaggtcttgtcaaaaatgaaacaagtcctctctgtggtaggaatcgcccgtaagcacggtggtgaggggaaactttgccttgagaatctcactcttaaaaacaaactacgctcagccctttctttttgccagtagtcatttattttaccgattctgagccaatggtcaacttcggggatacttcacatagttcaacaaactgtatgagctgcttttcaaaacacggcttgcatttcctgcccctcatcccgtttagaaacctgatggagtgtttctgaagacacgtccctaaaacttgagagggaagctcgattctttccaccattctttgtggtccagaggccagctctgaagtgggctccttaccgacgactccaatgcaccttgaaaggcaggagctgagcgaggctcacgtttcctgcctgtgcgcgcctctccgcttggaatgtttttctgccaactgaaagtagagcttgatcctcctcctcttctcctagattaagcctgctttcactcctttgaaattagtttggttcctgaccagaaatgcctaaaagaaagaaagagagagaggcagagagacagacagagacagagacagacagagacagagacagagagagacagaggagagagagaggcagagagacagagacagagagaagagagagacagagacagaggagggagagagagagagagagagagagagagagagagagagagagagagagagagagagaaaccaaagctcccaaaccaaaccaaaccacagcctctagtctttctttctgctatttggacttaatcaaatagcatctactttctccttgcttttcctctccccccacaccctttcttccccctacccaccccccttcttccttttcctcctatccggtaacttatttcttgagctctggggttttctctgtaagagggtatatgtaagcatgcatgcatgcaggggccagcaagtcaaccactggtcactgctcctcaggtactgtcccttggtatttgagacaggttacctctagggtcaggggctctctgatttgccaggctggctggtcagtgaacccaaggagtgaatccttatgcgtggctttcccctgcattccggggggggggggggcattgattgagagctcagggcctcatgactgcacggcaagtactttacccactgagctggatccccagacctggtgtggacgtcctttttcaaatagttatctttgttttcatttatttatttatttatgtatgtatgtatgtatgtatgtatgtatgtatgtatgtatgtatgtgtgtacagcggtagcatccagaagacatcagatcccctagaggtggctgtgagctcctgacctgggaatccaacctgggttgattctggcacagcagcaaatgttcccttctttgttgttgttggttgttttgttttgttttgtttttagagacagggttctctgtataatcctcctggctgcctagaactcgctgtataggccaggctgacctgggactcggcgatctgccttcctctgtgtcctgagtgctggcatggaaggcttttgccaccacacccacagcagatgcttttaaccatcacgccttttctctatcccccggtctagtttgttggtcttttctctgcggttataagtctttgcagtcttcagggttacacaaccagacaagcctttttccattttctttctcttgtgtgtgtgtgtttgtgtttgtgtgtatgtttgtgtgtatgtatgtatttgtgtgtctttatgtgtgtatgtatatgtgtgtgtttatgtgtgtgtatatttgtgtgtttgtgtgtatgtatgtgtttatgtgtgtgtatgtttgtgtgcttgtgtgtgtgtttagtgtgtgtgtgtgtgtgtgtgtgtgtgtgtgtgtgtgtgtgtgtagaagcatggttctttcaccactaccgtccagcagcagggaacacagcactcccagggattttcctgggtttgttcctcacccacccacgctcacccttgccgtactcctcacgattcagtacttctcaaacccagcacaaaatcccacttacacagttgtccaggaaaatccataggaaggggcttgggacaaatgataagcatatttggatttatttatgcctgatttgaggctgtttcttcaaaataaacttttatgtgaatgggtttttgtctgtgcaccacatctgtgccttgtatctggtgcctgtggaagccagaatagaagactggatccccttgctatgtggatgctgggagttgaacccaggtcatctggaatagcagccagtgtgcttttaaccactgagccatctctccaacctgactttctttctttttttttttttttttttttttttggtcaggagtgtggggaactcgtcctatctgccgacttttatggcaagtactttcctatactattggatccagtccttacaacatcatttctggcacatcattacactgtgaccactttgaagataaagaaactcggggcccaagggaaggtgaagtagaaaggcatcgaaaggcctctcctcactgtgtcagggctgggatttggaaccaggccttctgattttaatatcaggtttaatctatactctcaagcaaggtcgtgcagccagagcaactgactagaaggttccacagagaaggctatcagaggacattgacccacatgtgcatcactgatctgactcgttccaagcaaccgtaggcctcgtaggcctctctgctgtgccctgtatcactattttatgacccttttctggagagggtcaacaagcgtctcttcaatagcgagaggacatcaataaagaccaaagtggctctacccaccggtgagccggtgggtttcatgaggtttgcttccagcggcctaaggtgagcccgtggttgaccgttccctgcaggggcacaggcagcttacaggaggcagcatcactaaagagaaagctctcggttgctctcacaaccactggctataaaccctcagggaggatcctactcctccccacggcatgagagaaagttaatgggctcagtcttgccctggtctcctgtgggtaattacagctgctgagagttcaagagggtaactgctatgtcgatcttagaggatggtgtttctcaaaaaaacccacccactacaaattatatttttttcttgcttatgtggactagagacattattttagataaactatagatgtattatttaaaaaaaaactttaaatagttacaaatctcccaggaaagtataaaaagatatgacagagagggcctggcctgtgttcccgttggcaagttccaccatggccacacaagggcacagaaccttgacactggtctaaaactgtgtttaaggttctgcgacaccatgacccagaaggcttcgacagaaggattattgtgaatcggaggcctgtctggtctacatagtaagtttcaggccagcctgggctatgtagtaagactctgtcaaagaaatgaaatgaaaattaaacaaacaaacaaaaaaacccaacacatctaaaatttgcatatcgtgctatgtatcttttgtcctctagatcttccttccttccttcctcccttcctccctccctccctccctccctccttccttccccccctactcctctctctagacaggtttctctgttatagtcctggctgtcctggaaaccactctgtagaccaggctagtctggatccacctgcctcttcctcccaagtgctggaattaaaggcgtggctagattgtattttctgagaattcattgctcttagcttgtgctcattctcttggcatttttttttaattgatttgggagactttatatattcagcataataacgcttttatgggttagtagaagttgcacttgctggccctgcccgttttcagcactgtgcccctaaacctgacccaaccactgtcatgctttttaaaaaaaaaaaaaattattagatattttcttaatttacactgtcttcatgctttacagtggtggcttccatgtcaattcccactcgggcctgatttagcgatatcattttttccttaccgtgaggtcctacaatcattctgtgaatatgtagaatatggatttccttttctctttctttccagatggagaagcgcctgacctagtatgattcactgaacagccgtgtgttttccctgctggctttttccacgggcatgtgtttgtcatgcccttgacggtgccctgtgctgggttagccaatgccatggctttaggataagccttttggtctagtgtggccaggtgcctttctgttatcttagtgatttctggttcttgattctttagtatgaacgtaagaactaacttgccagataccacaggggaaactgtagatgttaactgtagtttcaatgcggttgtatttactggaaagtattgcccatgttgtgtcttgtcatttacctctctgtgttgtgggtcgatctaacttgactccatctcagtcaccctttgttatgcctgtctgcgaattccccacagttttactgctattattaatggacactttttaaaagttatgcccttagttatctgtatgtacatgataatacataataatgtcactgttaatttggcgatattaatttttatctaggtaccttgctgaactcttaaatggttctaagagttcacacgaggagtctggatttaaagaaacacgatgaacagttttattgtaagttccccgcaaacttttgaatctgagcttccatttactgttttgtatatatgcagggttaaaaaaaataaacatggatacccattcttggtacattataaagtatctttattcattaactttttttcccccttcccttctcccttttgctctggccccactcgctctgggcccccgcattaactttattattattattattattattattactaactctcattccttcttctattaattgtcatggaaaatttaaaagttgacaacgaaaattttaaatatgtaataaaaatttaaatctttgaaaaattaggaacctcacattgctgatgacctaattagcatgtggctttctagtcacgtgagtgtgtgactgtggactgagacacaggacaacttataaatctagggatacaataagaaagaataataagggggctggagagatggctcagcggttaagagcactgactgctctgctcttccgaagatcctgagttcaaatcccagcaaccacatggtggctcacaaccatctgtaatgagatctggcgccctcctctggtgtgtctgaagacagctacagtgtacttacatgtaataaataaataaattataaaaaaatctttaaaaaaaaagaaagaatgataagaatactgctagcacatctatgcatgtgtgtgtgtgcatgcgcttgcacacacacaccatttgttaatatgtaaaatcatgtgagatatatgttattgacatgaagaaaacatgaaaatgaaaaatcaaatttgggaagttactctatattttgagtaactatgggcgcttctgattgtctactggtcatgcccatgaatctattcctaactagagtctcaggatagatgataggcctgtaagagatcgtggagggattatttcagggaatggacatctctgatagatgctcagttcccaggacagcgtaggcccccaccagatctttaatctggaaactaggaacaggcttccctaacaaggtgtgagcagcggtgacagtgaggagaggagcccatgaaatctggaggcccatactactcatagccagggtgtcagccagtcctctcattgaaacaggaaacgtctaacactagctcctcctgaagggagtctctcaagggcctggctggtcgcattggaggggcttgtgtttccacgggtgttcaaacttcgttggagtgaggtccaggatgtggtctgaaccaagaggctctcgccaggctctttggttctccaccactgaatctacttggtcgaagacccgagtcatagctcttctcccaagctatgcaaataaacagtgtgtcctatttttaggacgtcattgctaacaaaaatagctcgaaacccagacatttgaatgtcagcagacttcagctttaagacgctatcctgtggcagccatgccgggcgatgctgacattttctcgggggtcgttgtttgatcttccagcatactcactgttgtcgtttctgtttccatttaggaaaaccaaggctcggaaatgttaggtgacccgccccaagtcagcctttcacaagcagagcccagggtgctctgtgagtcaccagccggacatcacagctctcgatttcgaacatatttccttcccacctcgccacattccatcttgacactggtaacgggatgttgttattacatgggactcggtccagtttcctgaaaggaatttagttgctacattagattcgagttacataatcaggaaatcacttatccttcttagcgtcttatttgctttattaaaaaagccattggaggggctggaaagacggttccgcagtcaagagcactggctgctcttccagaggaccaggcttaattcccaacgctcacatgacagcccacacctgtctgtaaatccagttccaggggatctgacaccctcacatagacatacaccctcacgtaggcaaaacaccagtgcacataaagtaaaaaacagttatatatatatatatttttttttttttttaaaaaagaaacccatttgtaaagaaagagaaagtggaaaggaaagaagaaggaaaagaaaagaagagtaggagaagaagaagaggaggcatcaaatttctgttcattaagctcatttcattgcgttcttttttacagagagactcaagacattttttccaacatagcatcatctgtggcaattgcttggcaatttaaagggctcccaggaactgcatggaacagtcttaggacatgcaatcaaacccatcagactctgggcaagctccaccagaagagaggctgcctgcccctcgccgattgctttaacccaagttaaaaccaagcttgggatcccatgcttgctgagatgattgacggctgtcataggagaaactacatctgggaaatttctcgccaggatctactgatctcacgtcgatggaatatggagaacaaatgttggtttggtttgccaagcaaaagcacagcgagcacccagcatccctgtgaatgtaacacacatagtttcagtttggcatctctccgctggagtgtggtactgtttcctgatgaggttccgttggctgcaaaagcttcagttactttgtggcatggtggaagaagaatgcctcactgaatgcctgcacccgggcttggctcaaacagctcaggaaaccttacctgttcaaggctcaatttccaaacacttccttttcttcctgttcttctgaactggaagattcttaaaaaaaaaaaaaaaaaaaaaacaactaaaattggatttcggtcactgttgttccaggacagatgggaatgtgataatactgtccttgcatggatagggtgtaggtatatatgaaagaaggcatgcctctttaaaaattcaatatgccagtgatctgcatttttatcctctagaacaacagcaaaaggcgttgtccaatctaatatttatatgcttgaaagttctcaaatgatcacatatcaaaattagctatagtgactataattaaaagcagtctcagctgggtgtgctggcacggggctgtgatgccagttacttgggaagctgagtcaggagtgttacaagttggcaagggtcacaaggcttgcccgggctgcagagtgagttcaaatccaggctgggcagcttagtgagaccatgtctcaaaataaaaagtgtgaaaagggctgggatggagccctgtgttcttacctagcccgtgtgaaatccaaggctcaatccgagatagggaagaaaaagatcagacacatttttaaagtaatgacgggtacaaagacaaaggtgcctgcgttcatctgggccaaggtgcaagctgttccctcatgtctccttactcacaggacattgcccttgcactcctggcccaagatggctcttgattcttacattgctccctttcgccgagctatgctcaaatgccaagcaaaagcaacttaagggaaggagggtttgtctcatggttagagagaacagtcagtggagtggggtgggagtggaggaatcatgcagcagcttcagtaggaagcagagggaggtgaacgctggggttccactcatcttctcctctttgttcagtctagggccatagtccaggggttgatggcatccacaatttggggggtggggtgggtcttccccactcagttgagcctttctgggaacaccctcataaacacacccacaggtgttgattctaaaactcgcccaattaatgggtttgatgaacattgaccattttccatttataacctttaaatgttgctcacattgctttggccaaaatgggatcgcccaagcccatctgaccgcaagggaagttgggaaatgtagtctttgttctgcacagccatgtttgaccaactatacaattaggtttctagggctggagagatggctcagttacgtgcctttgagccaatgtgaaggtgcgagtttggatgcccagtaaacatgcaaaagttggttgtgactgtatccccagcactatcagggaggagacggggagacctctgaagctccctggtcagctagctgagcagaattggtcaggtacaggttcagtgaaagacctgatctaaattttaaggtagaaagccattgtggaaggcacacagtgctaacctctggctttctatatgtgtgcacacatccacaggaacaagtgcattgcatacatactcgtgcacacacatacacacacctttcaactttaattctaatagaaggagactcctctgttgtcacttggagccacttagacatctgtggcttctatttatttccccacactaggagtcaggtacaagtgaacccattcatcagtcaagaaaaagagagatcaagttacttgctgagggaacacagctagttctttgtgagcctttggggtgtgcctttacttctgttccctttgtatgttgtgtgtctagtttcctgtgtgctagcactggaatcggggtggagatacctctgctttctcggggttgccacagcagactggtacctcatttcaccacaccacttaagaacaggtgtccaggaaggtgtcccatgacttgcctttagagttcaaagcaagcacacgtttaattttgttcaaggaattctgtgacacttattgagcaatgggtagtacatttgagtgttgcttaatcaaaactgggaaccaggccaatcgacattcttaggtttgattcagattatacctgacttgtggttaggttagaaaacccatccccccagactctcctttccttccttccttctttcttccttcttatgtcttaccccctcctttttttttcttgctttttgatacaaagtcccagatatctcagggtgaccttgaactcaccaaatagccaaacatggcctggattctgatcccttgttcttcatctcccaaatattgctattcagatgtgtgccacctgccctcaaaatctttttaattaagaaggaaattcttccaagtacttgggagctagatgcaggataatcaagaactcagagggctatgtagggactttgaagctagccttgacaaaagaagagaagaaaacctttattcattatttctataatttttttccagaggccaatgctgacacaaagacaatctcttaaggtggcagattttctagaaagaattttattttaaggaggaaaagaaaaaaaaacaccattgaaaacagatgttgttcttctacgtcatctaaccactggcatcttccatggagcaaaatttggcaggaggttttggttctgggttccccaacccccagagcacaatttccaacagatgctatgcactggaaacaaaatttaaaacagggaaacctggcttgtcaaagttcaaatctgaggttttccaagtttgtgttccagatccagaggacatacccaaagaggaagccatttgcttgattcaggcccagggtcagttgagccactcacctttggcagcaaaacccaccaagatgtcaaaaatatttataaccaaagatgctaatttaatgctgcattaaaaaataatgttaagaataattgtgatgagcaaatgccatatctaaatttttattcttaaatttttcaaaagtgtataaagtgaaatatgatcatatcccctgctactttttcctccaatttcctcaaatcacccagcacagccagaacccaatttcatgtctttttttttttttcttttttaataacccacttattggaggagggtctcgtgccccgtggtgtatttagacgctgacttctgtccctcgtgatctggttacattcgggatgagggcattgtcatgaatattgaaaaatctcctgtatcaacgtagtgtaaagactgttccccaactacctctgattggttaataaaaggttgaacagccaatgactggccagaggagattgaaaggttggacttccggtcccagccaggggtctcagaaaagagccaggaggagccccgaggcaggtgaggaggtacaggaggcaggtagaagaagaggaagaagaagaaaggaaggagaagggggaagggagggggaggagggagaagaagaagaaagtcagcatgaggttggtgtgaggtgcagtcactaagggagttcgacttgaggactctccgagggagagccctttcccttgtctatgctggaagtttggctggcttaatcttactcacgtcttgtgttggtgactaaagtcaccctgcgttcatgagctctgctcatgtaaagaccagaagcttgcccttcacagcattcctccccttctctggctcttacgttctttctgcttatcttccacaatgctccccgagccttcgggatggtggtggttgtgatgggtgtgccgagaaagacatcccatttagaactgagcacccagccctctattaccgacacttggaccagctatgcattcgcacaccaactgatgcctactgcaaaatgaagcttctccgaccacagttgagaacagctcaggtctatgggtaaaagtgaaatatttaggaagcagtttgacaacacgaccatagcaaactaacaatagcaggttctgtcccgtttgaaatgccaagatttgaaataaagtaagagccgtttgtttttgctttgctgccgtctttttgtgtgatggaaacattaatttctcacgaggcccccaagctcctggtccccagatttcacttctctcagctggatgggttatagcagttacagctgtgtggatacattcattacctacatacaattacagctggttggtgtgggggctttatacttatccacctctttgatagagccttaatttttctcactgacttcaaaataaaggaagctgtttggaggagtgtatagatagcacatattttcccattgcttcgggcttcaacatggctccacaatggcgttcaagaccctcgtggtggggatgtagctcccagttagaacacttatctaagcatgtgcaaagacctgagtttgatcatctgcaccagaaaagtcaagtagaacaaaaagcaaatctccagaaaactcatggttcattctagctgatctgtgattcatccgggttcgaataccagggctgcatcttactctctgagtacccctgctctctgataccagggctgagtcttactttgcctctgtctcccttccatttttgttgaacttcccagccagctccctcttctactttcctgtcttctgctgagtgtatgagacttgctgagtttaaccaggggtgctcacaggctccttcccagcagccacagaactaaaatgcccaacccttccctctccagagcaacctgaacctgcaattcagggagggacaaagcctcgtgagtactcccccaccacaacattttgttgtttataactatccagactgaggagtttggtatcagcagcaggatgacacgaggcatccaggtggaacagattggtgatgtcctatggatgtccatacctgaggtgtgtgctagctaactttatatcaacctgacataagggtaaagccacgagagaggaaggagcctcagttgagaaaatgcctccataagatgggttgtaggcgattctgtaatagagcattgtagctgaacgaaataattaatttaaacttatccctgtctagcttacaaatgaatgagactcagactgtggttattttatttggctttgaccattactggggagtaacccctaatctacaatctacttttctaactgttgtgctgactacctccccagcagtgtaccccaggtacttgctggttctcctggccctgtgctcatggtccatctccactcatggcagctcccctcccctctctgcaatcccttaccaggtaactccaaaccctgtctacctctaatccctccagtaattggctgtagctgtttttatttaaactgtcattttaaattaaggaacaagatttgtacagccacagtcatctattggatggaacaaagggcccccaatggaggagctagagaaagcacccaaggagctgaaggggtctgcagccctataggtggaacaacaatatgaactcaccagtacccccaaagctcgtgtctctagctgcaaatgtagcagaagatggcctagtcagccatcattgggaagagaggtcccttggttttgcaaattttatatgccccagtacaggggaacaccagggccaagaagcgggagtggggagggtataggggatttttgggatagcatttgaaatgtaaatgaagaaaatatctaataaaaaaatttaaataaataaataaatatttgtacagcaaaagccagtgaaagtgagaattcactcttaggcaactagaccttcaggtacagaactcagaattataatacaaaacagcagaccaaacaagcctcaagagaacgttttcttgattagtgattgaggaaggagagcccagctcatagtgggtagggcaaaccctaggctggtagttttgggttctataagaaagaatgctgggcaagctagtaacaacatccctccatggcctctgtattagctcctgcctccaggtttctgtcctttttgagttcctgtcctgacttcctccattgctgaacagtgtggtggtttgaaagaaaatggtctcctaggctcacaggaagtggcactattaggaggtgtggcctttctggagtaggtttggctttgtcgaaggaagtgtatcattgtgggtgggttttgaggtctcagatactcaagccaggccagtggctaatagtctcttcctgatgcctatggatcaagatgtataatttgctgttgccccagcaccatgtctgcttgcatctgccatgcttcccaacatgacaacggactaaacctctgagctgtaagcaaagcacaatgaaatgttttcctttataagagtttctgtggtcgggtgtctcttcatagcaatacaaaccttaagactaacagtgatatggaagtgtaagccaaataaactcttttctccccctacttgctttgatcatggtgtttcctaacagcaatagcaaccctaactaagacaggttccatttctgaaggtcaagggatattcaactgtcagctccagagtttctcatcacattgtgaagctggcattatagtccccattttacaaacaacaaaactaagactcaggatggattagtaatttccttgaagtgtttctaagaagagtttcaaacccaggtctgacaccacacagttcctcactcccctccccactccccattgttaactcacaaaggaggtagtttttggatgaatctcttcccagtttggaggtgaacgagttccccagggagacaggcttcaggccagttctaagcagatctacagtggatacagcagggtccctgggtgaggttagggtggggtaggatttcttggcagatcttcttacaagtaactttagaaattaaaaaccaagaaaatgtcaagatgttatttttgctttgcagagtgtgttattccagcattttttttgtacaatcaaatatacaaacacaagccacctaattgtctattaaaaatatttccttgtagaggaattttaatccagcaacatgactgctctggcaagggatcacatccagagaccttctaggtcttagaacacacctttaatcacaaacaataaaggcaaagttagtttgttgaagaaagccatgtttgagagtgacatctaactgagggtcagacaatgtgaccctcagagaaagagttgacagaatgagtcagagatagatatgcccaactctcatgagaacagcacaagaaagagagactacttaaggcatcacagagtgagttcagtttgtgaagggaaggagccatctttccagtagatcaattcagtaagaagccgagagaagccagtttggatcagtcagcttggagagaagtttgagccagaaaaactgagctgaatgagccagccagagttcagaaagagcaagaaatagtgagtttaatcagcaatctccgaagctgaactattctaggcctagattagtatcccgagcttttgttcccaccggaaagaacatgctcaggacaaccggaatcttctgcggcaaaagctttattgtttacttcttcaggggccagagagagaatggcaaaaccccgtcccttttaaggagaattatcctccgtctaggacgtgtcgctccctgattggctgcagcccattggccgagttgtcttcacggggaaggcagagcacatggagtggagaactaccccagcacatgcgcagattatttgtttactacttagaacacaggatgtcagcgccatcttgtaccagcgaatgtgagggcggctccccacaggttagcagatggagccttcaaggtctcagctggcagaagattaggttgtatggaggctagaagcttccaggcctagggatagttagtacagagaaggaaaggctctgggctcagcccaaattgtgtattcacacagcttgtatattgctctcatctcaccactccatctgaggaaataaaagtgatgtttgcatttagagtcctattttattactgtgtgattgttaactgcccaaagagtcctaatttattatgatcctgttatgtacaattttacttgttttgtagtacaccaaaggcagcattgctgagtaaatacagaagtaaacacatcataatggtttattcaatttgttccaaagacttatactatttgtgtgtgtgtgtgtaagtttggaatttgccttgatatggcatttatagcgattatttgaaggcctaggtaagacagttgctccatcttcctttaaaaccatccctctgctcagagaactgcttagtttggtcatcaactagttacagtttcaactcaatgcctggtcagggacgctggcttttccacacagtcctgggggatgctactccttgaatctatgatatgctggagatgctgtgagaacctggggtaatgcctgcctggtggggctgtgataccaatgaacgtgagtggctcaagtcctgagcatgtgtctggtatgtgctcatgggtagtcggtcaatcaagacctgcccatcttaagtgaagcagagcccgttccctatgtgaaacccaacccttccctccaggctccatattggtttctatttgttttccagccccatttacctcttctttggaacaccaatcacatttctgtttattttatatcaatttccctcctctacctgagtgcatgtcagtagctgatcagacctaccctcacattaagtgcttgcttttgcctcagttgctgcagtgtagccttaggctgcctgcctgcctccagtgctgaagagagctgccttgctcagtaccacagttctttcaatggctgaatcatggctctgaaagaccagccatcatacatcatatatgtctatagacacatatacatgcatacatatatgtatgcttgtttgtttttggacagattctcacatcataaccttgactgtcctggaacatgctatgcaaacaaggctggtcatgaactcacagacaaccacctgcctctgactcccaggtgcaccaccacacccagcctaagtgttctttatgattatttcatattctgcactgccctgtgctcaatcttgcttccttctctttcttctatggaggtaaccctaggactattccctaagagtattccctaggagtattccctgatgcagtgtttgcactggctttctgggaaccagcatgtgccaccatgcccttggacatgactgtgtttggccgttgtgcacgttgtccagggtctctcagagtcgctggcagtgggtgagaattgagctgatgaatcaagagcagctgaaccttggggaatttctgcttctgtcctgacccacctccttctgcacaggaactctctgagcttctatcctggagtcttagggtttccactgctgtgaagagattccatgaccaaggcaactcttatgaaggacaacatttaattggggctggcttacagggtcagtccattgtcatggcggcaggaagcatggcagcatccggggaggcatggcaccttaaggagctgtgagttctgcatcttgataggactgcagccaggagagactcttctgcagatagccaggaggagggtctcttccacactgcacggagcttcaaagcccacctgcacagtgatacacttccccaaagaaggccacacctcctctaacaaggccacacctcctctaacaaggccacacctcctctaacaaggccacacctcctctaacaaggccacacctcctctaacaaggccacacctcctctaacaaggccacacctcctctaacaagaccacacatcctaaaagtgccacattccatggggcaagcatattcaaaccaccacaccgggaatttatttcctcctcttcactcatgtccacattcactttctcagtcccctttcctccgtccttgtcccccttccctcccatcttcctcctcctcctgctcctcctgctcttccctttcctccctttttgtggctctgatcctggcagctgaggagaaagtctgataaaactggctgagttgggaacagctcagtgagctgaggtgtccttaaccccagcatcttccctttgaagctggtgtggaccttttaaaaaccgtgctgctctgaggaaatcaatatcccaaggtgctgcttgctaattgcatggtggcctcagagggtgttttctcattctgaatgagaagaaagaaccctttaaagcaacaactctcctgtataaacagagggaagagagaaccctcattttaaatccttgtgaaaaatggcctctttgttgttaaattttcatcctcagaactgccatcctgctgccagcctagcgttgagggtctttttcaaaaagctccttctacctgtttcagagaaagcaccaggctcaattcggaattccagaagaatttgagacctggacctgagtgcctgtgaggctgtgtagtatctccagactcatctgcccggcaggcaccgctaatcatcccatgcagtctatatggcactccatgcatgtgagcacactttgaatacttcaaagaatgctgaaaagaaattgtcactcgatcctcagttaaacagggcttgaaagataaggttgatataaaacaaataaaaagtaagaaggaaatagacttcaaggccaatataaagttttagaaagtattatttttcattttggatgtttggccattgtctgtagcatgttgttttttctctagaaagcgctagtagaccccacctagattcctttggatccacagataacaacaacaacaacaacaacaacaacaacaacaacaacaacacacacacacacacacatgtgccagttaatcttaaaatgcctgtgctaacccaatgactgggcactcctaaaccttccctgctacctcaggcataatcggatagagtggccattagccactccaaccaaaaactcacatggcccactggcatcatctccttttcttccccagtttaactgattctctctgcacccccctgagcaactctaagtgtcccgcccagtgctcagtaattggtcgctgttatctttattgattgatcaagaaccaattggggagcaggaccttagcatgagccccagtggtccctggtagctacacaactaagaataaaaagtccttgtcatggcttctgtgtaaaacagcctatccttttcattcattcactgatacaaggcagacctggggagacgcctgctctgtgaaccacagccttgagatgctgtggaagctggttcttcttctgctactctttagtctgaggcatccatggctcacatgcatccctattttctccaaacaagtgatgctctgagaatggacactattggggaaagtctttcattcactcatctgaacatagagaaagcaacatgttctcagcacagggcagttttccacagcaaattggcctttctcttttctgtagaaggcagatgggtgaggggccaaaagaggctccaaatggctgcctttttaatgagaatagattataaaatccttataatagttagggtatgccaaagtcttagaattgctttatgatcagatgtgagcactcaagaatataaccaacctctcattagagatgcatggatcgtggtaaagagttttggaacaggaatgagcttttcaaaagctttaaggctcaggtatagccattttctctcaggataagctttatatcctgtgtgaaacagtgagctgtgacatgtgctaacacatgtgcgagtgcacacatacacacacacacacacacatacacacacacacacacacacacacacacacacacacaaccaacatcacaaaaacaaggagacagatactgtgtctgacatgatgtctgacatgatgcttctaccatgaagatggtaagaccataagcttgacactttgtgtgtgcatctctctgtgtgtctctgtgtgtctgtgacatacctgcatgttgacactggatgtctcctttgactgccctccgctttatttacttggggcaaggtctctctcactgaaccttgagcgcactgattctggttagtctatctaaccttcctgcatagtggatcccctgtctccccccagaagcttggattacactcgaggtaaaatgcccacttgggttttatacgggtgctagggatcagaactcagtcttcaaggttacaggacagcactttatctactgaggccatctccctatgcctaactctagtcttagtttttttctgaccctctgtacttccaattgatgctttttaaaatgtgaaatgatgttattatcccactcaaaactcttccatggctcctgcataaaacgaagctgacatggttgcttaaatagtcagcttgacacatctcttgggagagcctccatgaggggtagtttagaccagtttggtccatgggtatgtctgtggagggtcatcttgatttccttaactgatgcagtgttgggccctatttggccttggtttgggccttgaggacaaacttgagcctggctcgattttcaagacctgtcattcgcttgagaatgactcagcatgacctaccgacctgactgagcctgcctctgcctatttaccgctgatgtatcaatttcttacaggccccgtgagatcaccccacacccctcgtcatctcacaccacccaatacgtcatctcaccccacacccctacccccacctccttgtcttctctatataagcgagtgcctagtttaataaaataagttcccgctttgacacgggcctttgacacgcagcatcccactcaaccccagagggactgggctggaccgggttctctcctctcccctggacctgctggcagagaaccaacaacataggagcctgaaaataggtagcaacattccttgaattggggtcccagactctataagagaaagctgactgagcaccaagcttaccatgttcatttctcatgtgttgtaacgagctgcttcaaggtcctgctgccatcaccagcattgtaaagtaaaatcaacctctctcccctaagttgatcttcatcaggatatttgtgtgtgtttgcatgtatatatgtataatgtatatgtgtatatatgtatacatgtatatatgcatacatatatattttaaccacagcaacagaaatgaacataggacagcagcctccttgtttggccatgaactgagtcagcccgggtattttgggttgtgccaatttcactcctagaataaacatatgaatttgactcgcatgatcaggcatagtttgattccagagcactgggaaagacaagctcataactaccatgagggttgctgagaggtcttacacgcattcacgaccggccaggaagaacacagcaaaccagaatcttctgcggcaaaactttattgcttacatcttcaggagcaagagtgcaagagcattattgcttacatctttaggagccagagcgcaagagagcaagagagcaagagctctattgcttacatctttaggagccagagcgcaagagagcaagagagagaatggcaaaaccccgacccttttaaggagaattatcctccgcctaggacgtattactccctgattggctgcagcccatcggccgagttgtcgtcacggggaaggcagagcacatggggtggagaactacccttggcacatgcgcagattatttgtttaccacttagaacacaggatgtcagcgccatcttgtaacggcgaatgtgagggcggctccccacagagaggcaggatgcaaactcaggcctcaccaccaccttgtcaccccaagtgatgacaagcaaagctatactaaagaagggtaagcagtcactctcagtgacatcatacagtcatggctgacccctgattcctacaagaactcattcatcactaggtggacttagtcagggcattctagaacaagaccaatagagtgaatatatgttacaaagggaatttattagggtgagctacatggtatggtatccgttgtctaacaatggttctctgtactctggaatagctaagaacctcacagatgctctgtctatgagactggatgcctccgtagttgcaatctggtcctgaaggctggaagattcctggagggctgctggccttcgttctgtgttagaagtctgaagaacccggagttggatgtcagcgaatggcagctgaagtggcagatagctcaagtgacatagcagatgcagtcaccagttagaagtgaaggcgggtcctcaaaagcagccccacttccccctgggatttctttatggcgctgccactcaaaagtgggagagtctgtccctaacagttaaacctagaaaatatcctgtcagatgggcctagagacatgtctcttagttgactccatatccaattaaggtgccaatcaagcttaaccatcacattgcattttctggatgcattcccaaactaagtgtctgccaccttcgactgactgactgtaagagttagcttgaaagccagcctctttcctcacagttgcccaccgaagccttctggagagtcctctgattagcccaatgccatactttgtcccctaacagaacatagaactggaatgatgggtaaggatgtgtgtatgttctggggaccagctttgaggtctcaaggagaggagtagggtgaagggttagagttgatgtgaagaagatgacattatccagagcaaaattttcctgcttcctgtgtgaccctagctgcctaatgagtattggtgtagtacgtctgtatgtgtgtgtgtatgtgtgtgtctttgagagagtgtatgtgcatgtatgtgtgtgtatatatatgtatgtatgtatgtatctgtaagagagtatgtgagcatgtatgtgtacgtatgtgtgtatgcaggtatgtgtgtgtgtgtgtttgtgactgtgtgtatgtgagtgcttgtatgtatatatgagtatatgctcatatatgtgcgtatgcgagtgtgtttgtgtgtgtgtgcctgtaggtgtatgtatgtgtgtatatatgtgtgtgtgaatatatgtatatatgagtgtgtttgtgtgtatgtgtgtatgtatatgtgtatgagtgagtgatagtgtgatgtatgtgtgtttatgtgtgtatatgtgtgactatatgtgtgtgcaagagactgtgtatgtatatgtatatatgtgagtgtgtgtatgtgtgttatgtgtgtgtatgtatgtgtgtgagtgtgtaatgtatgtgtgtatatgtaagtatgtatatgtatgtgactatgtatgtacatatgtgtgtatgtatgtgagtatgattgtgtgtatgtatgtgtgtgtatgtatgtgaatgtggttgtgtgtgtgtgtgtgtgtggtatatgtgtgagtgtgtatatgtatatgtgtgtgagtgtgcgtatatatgtgtgtgtggttgtatatgtatttgtgtatatgtgtattgtgcgtatgtgtgtatgtgtgtgtatgtgtgtttggaggtatgtgtatgcaactagaagctggagatttttggttttgttttttctagattaacaacacatttttgcctgcatgggggaaaatgttgtaaggcagattagaacaaaacaagccaaaagcagagctaacgttgccttcttgacaccttatgactcacctaaggcatgctgatcaaccgcaggcatcagtaaaccctgatgaaaggggccagggccagttctggggatctgggcaggcagtgccatcagcatggcttgctcatgctttgagtatgactgccttacaacttcagttctccattgcgatactcagaaaacatgaaatgaaactgaggggctttccctgctggcaatcccattctgaggactcatgaagacagggattttatagtcctgctggagcctggggtcctccttcctccatatgcctggaaagctcagaatcaagcaagaccaaactatggtggtggaagtcaggagactggctaactttgtgggtgtaatagggacttggggagggtaagagagggctcacgaattcttggtaatgctgaattctccaatgctgtgcaggttacatagaagtgcttagtttgagaggaccggttgagttgcatatctgtgagtggcttacttgctctaggtgtggctcaataaaaacatcacattatgttaaatgctgttattgtaggcaaccatttgttcctgtggtggtcttagaaacaaaatgaagcgaagttatatttaagaaaataacgattgaaatgaatatataaaagtttaaacatatagtagtgtgttcacaactctccaggagtttcaaacactggttaaaaaaacaaaaacaaacctaaagtgggaagtaggggccgaagagacggctcagtggtccagagcacttcctgatctttcagaggacctgggttcaagtgccagtactcacgtggtggctcacaaccattctatgagtccagttccaatcacctcactaggcatacacatggtgcacagacgtgtgcaagcaagagggccggggaggggaagacacccgcccctgcccttctgaagtcctgtgctagcccatggtggtgatttgaatctttttttttttttttttttgtttgtttgtttgtttgtttgttttttcgagacagggtttctctgtgtagccctggctgtcctggaactcactctgtagatcaggctggcctcgaactcagaaatccgcctgcctctgcctccggagtgctcggattaaaggcgagcgccaccacgcccggcgatttgaatcttaatgttccccattagttcacggattcgaacatttggtgccccagttgctgatgctgttcaggaaggttatggaaactttaggaggtggagccttgcttgaaggaagagcgtcgtcgtgggtaggcggggtggggttttatggtgtggtcctacttccggttctgggtattttgtttactgaatatagatgaaatgggattggccagcctcatgctcctgtcaccatgcctcctgctccaataagttgtgccccctctagaacaataagcttttcctcggaattctaagtcacttttcgtcaggatatcctattacagcatcagaaacttaatactcaatataaggaaattttgtcaactcacatctcccccatttcacgggtacttgtgtagtttaaatgccagtaatcccggtttgaactgtagcaacgccctccactctgcgctatgtataatccattgtcaactcagcaaaaattatatatttaaaacacagaggctgggggtggtggtacacacctttgatcccaacacttgggaggcagaggcaggctggtctctgagttagaggatagccagtttgaggacagtcagggctacacagagaaaccctctcttgaaaaaccaaaacccaaacaagaccgagcaaacaaaaacctggttccaattactccccaacctgaagctcttcagttttttccctagcactccaagttaaattccaagatctgttccataggcccctgcaggccaccattcttcaacccctactgcctctctgaccagttcccatcacactctcttggtctcactgctttccaacctgcatggcccacacccagtctcttccttttttcccatgcgtttgcgcacatgaacaatgggtctcccagatctctgcactgtcggctgcggtttatccttttgatacccagctcaaatgttagttccttaagtatcgtctcccagccattattggttccatactctgactttatttttcaatgtatggggtgtgtatgtgtgtgtgtgtgtgtgtgtgtgtgtgtgtgtgtgtgtgtgtgtgtgagagagagagagagagagagagagagagagagagaacacttaatatggagagcaccaggaaacatggttcttggctaccttgtatgtggttgtatcagaaccccaaaaagcagcagacagcattcttaaaataccttaactgaaaaaggaaattaacaaaagaactgcatacaggcacgtaggcaggcttaggcttaagggaaccggtaaggcatggtgaggaataaagcagccatattactctgcattccattactataataaaatacccgaggctgggtgagattataaagaaaagaagtccaaggctgagaggctgttgattgccttgctgagagagtccagggcctctgggatcataagaaaagatcccaggcataagcagtcttgtgggactaagttttcttaatatctcacactatcacaatagggatcaaatttcagcacatgaaccccccccctgtgtgtgtgtgtgtgtgtgtgtgtgtgtgtgacccaaatcatattaagtcataacaagacaatgtctagagatgaggaactctggaactgggggagaggggttgtggcagggagcaagtgcagaatggctaacttgcccatgattcaccctcctgtcagtgttttcctgactgaatgcaactggaagccagaggataagggtgcagggggaatgtggctcataaatgccaatcttctccagcatcctggggcacagcagagcaggaaagaacaaccaatggactggatggaggcaagccagcagaaccagccagttcctgcttcagcatatgccaaagagaaggtgataactaagtgagaagacaaagaaagctgaagcaaaagcagatataccaataggtgtttcacaagccccgaggtggtggcgcacacctttagtctgggcactcaggacgtagaggcaggcggctctctgagttcgaggacagcctgatctacagagttccaggacagtcagggctacacagagaaaccctgtctcaaaaacaacaacaacaacaacaaacaaacaaaaaaagtttcacaagcctcagtaaggtgaacgaaagtaccctctacaaacctgcagtcagatgtgtggctcacaaccgtaacttcagtgctcaggataataagacaggaggcgtgccatgaacgtgaaactagcctggtctacagtgcattttagacctgcctgggctacagatgtgaggctctatctcaaaaacaacaaggggaaagcaataatctttaaacctcacagaaattttacaagatataacatcgaccccgtgtgtgtttggttaaagatcctgagacctttgagagtaacggaccccagtaacgtggaattgtggagccaagactacaaatgaggccccagatttttttcattggaccaagctaaacatgtttatatgaacaagttaaacatagacacacacacacacacacacacacacacacacacacacaccccgtagccccccctccccccgctctggtcattcccggaaatgtctgtctgcttgccgaatccctgagcagagtctgtttcggcctcggtggcttttagcctacatagggtccacagaggaaggcagcttccgccggctgaatattatagtgacaatctaacgccattcatactccaatcaccaactgttgctctccttcatcgctattgtgtagggtgtctagatttatttctattgtttgtagtcatgcatctcccgtgtgggtatgtgtatgtgaatgcaaatgcttacagtgatcagaggtattggattcaaccgggaactggagctataaccaacataagccgcccaacgagtgtacagggaacccacctcatgtcctctacaagagcaggacacagatttaaccatggagaaatttctctaactcttaattttaatttttttaaattttttaaataaaaattgatataatatatattatatgttgagcatattcccctaaagcccctaccccctcctttcccgcctcctgttagtttcatttcttccccaagacagtttcacttctgcctgtaggtcagatattcatacatgatttcatgtatctataaaaaaaaaaaaaaatccaggaaccacaaatgaaagaaaacatgttctattttttttttctttctgaagctggctgaattcgtttaattggatcgtctccagtcatatctacttccacacgagcagcgtaacttcatgttcccgttgtgtagatagaccacactctctttattcatgcctctgtgctgacttcgtaatcagctactgtagactagagctgccgataaccacagacgtgcaggtacctctgtgatggtttcccaagtccctcagggaaacacctagaagtggctcatgccctagttagttgtttgagagacctcgatactgattgcctcagtgactggaccagtttaccttcctaccaggggtatagaagagctccctttgtccgaatgtggccagtgtttgctgtttgttttcttgatgcctgccattctgactggctggagacagaacgcagtgtattttaatttgcagccatctgtttctttataatgtaattatttaagagcaccccagctctttaaggctttggagaatctgggttttgtttgtctcctgtcacttcgtctgaagcacttgggcaggcacgggtcagtacagtcagttatttggtgtcttttaatgtttaagaaaaactcacttagacggtacattgttacacatgcgccacaaacttgtacccttttttctcccattgaatattggacaatgagtatttattatccaagctatataaatagcactttcaaaacaattagcatatatcaattgtgtatagtcatgagttcatgtctacaatgtacttggctcattttcaccccatcagaactttcttttttatctttccttttcccccaccctaggtgtgcttattcttcccaaataacatttcttttacttttatgcctcaagaaagaaaaccagactccatatgtgagggaacgtgtgtgatgattgtggttctgagcctggtctacttcacataatctgatgagctccagtttcatccattatcctgcgaatggtattttgttctttatgactaaataatcaggtactggcagcacactttctgtatcacccattaatgggaacccaggcagattgcttcacctggctgctgtgaacactgccatggcacatgtcattggctctctcatagtaactctaggggtgtaagttacttcaagggatttttctgttgctggacgtttgactatgcggcatcctcattccattcaatatctactcagtatcaaggttgtcaggagcaacattttggaggcggatttctttcggtggaattgctttgaggagagctgctgtcttcagggaatgcctagaaaggatggttacactccacagctgtaattacatccaatagactcagcttgtgaatctaatttgttttgtaagctaatccatcttgttgtggaagagttgaaagtgtcttctggtatacaccggtggaagaatacctttataaaacccattcgtccatctatccccacccccacaaccatccacctgcccacccacccacaatcaccctaggacactaggtgaggggaaagggaatagaagagagattaataatgggtgaaaaaaaagatccaagtacattatagacatgttcttattaccatgtacaattagtatatgctaataattttgaaaatactgtttatacaacttggataatataactactcatgagctaatattaaatggaggcaggggaagggtacaagtgtgtgtcacacatgtgacaatgtatcttttaagagtggcatttcgctgggcagtggtggtgcaacgcctttaatctcagcactttgggaggcagaggcaagtggatttctgagttcgaggccaacctggtctacagagtgagttccagagttccaggacagccagaactactatacagagaaacaaccaaaaaaaaaaagagtggcatctctctggggctgtggtcttctccaaaggtgtaccatttcaccatctttagtatagctttgtctattggtgagcaagagctaagtccagatgccattatgactgctcaaagtcccagtcaagaccacataaattccatcattatgttgaacattgtagaattttttgaggtatcaaattgaaatgtcaacttccattgtattgaaactaccaaacagcccctattagtgtcagaaaaatccccttaaaatgccttaaagcatagaaagggatgtgagaaggattctgtattggctgagcatccgtgcacatctggctggaaaccgaaccattagtcttgcaagcacaatgctctggctgagagtggtgaagtctgtagctggtggccctgctctgcttcagagtccactccacttcttcttactatgtggcatagcaaaactctcagtttctcttccttactttcattatcaaataaggtaaaagtttcatctcctttatagcctcagaggcctaattacatttgtatacgaagactcagttcaagggtgtgttaaacagagtgaacatttgcagtatgtcttagcgtttctagtgctgtggtaaaacctatggtcaaaagctgtttgaggagggaagggttcatttggctcacacttccacataatagtccaccattgaagaacatcaggacagggcaggaacctggaggcagaagctaatgcagagggcatgcatgtatgggtgctgcttactggcttgctcttgcaagacagttgatcatacttcggaaccctgagattgtttcgtttactggaaaaacctgtttctagttgtggtgtggctcacccttagcacacatctaaaatccctttgactgcaatacagacaggcctttagtgcacacatttaatcccaaacaatgaaggtaaagttaatttgtagaaagaagcacccatgtttgaaagtgatgtctaattgagtggcagacaaagtgatgaatcagagaaagatttgacagaattagatatgcccaactctcacaagtggagagaggaaagggaagccacttgaggggcagtgcaggcagagagaggagggtttttttttttttattgagatagttgtactgagacagacgattagaacatattgccaagggtagtttgaggccaagcagagcaaacaagtcagaggccaaaagagaagctagattgaatctgtcagcttggagaggcatttgagccagaacagctgagttgaaccaacctgtaagagttcagaaagaattagaaaaggtgagtttattcagcagcaagtctcagaggctagaaacagtctagtgctagattagactgtacagaggctagaagcttccaggactaggtctaggttagcagactgaggcagtaagcctccaagatgacaggcaaataaaagatactttaacactccccatggcctgctcagctttacttcttatagaaccccagggtcataagcttagggatgacagcagtcattataggctccccccatcagccattaatcaagaaaaggcctcacagagttgcctacaggtcaatcttctggaagccttttttctttttcctcagttgagagtcacttttactaaaggactctagcttgtgtcaagttgacacaaaacaccaacccagcactctccttatcttcaaagcttttaccctttccctgaaacaagtcgatgaagcagatcaggtgttgaaaaatggccagtggatacgttcatctcagcctgtagatattccttcagttagaaccaatgcatggaatcctaaagttgtatatagaagacctagatttctgctttttcttgaaaaacgaacaaaaaaggcaaaaaaccctcatgtgatagcaacaagctccagccatgaacaaggagagaggcaggtggataggcttccaggctgacatgcacttctcagctcttgggaacacactggctcctgctacttagctatttgggactcattcagcttataagaaagaagttgtcctctctatttttaaactagactaaaagccatagaaaatgcataatttattcaaaccaacaaaggccagtttgccacatagtaatcctttgacaaatgtcagctcccagttctctgttttatgggcaatttaaggcataatttcttttccaaaatcacgttgtgctctttagagaggcttgaaagtgccatgggacctcacaatttatagagtttgaaattaatttgaacctgccattcgtgtttgtgggcatgagtgcgtgtgtaccacaggacccacacgaaggtcaaaaggcaacttttggagattgttctctccttccaccatgtgggtcccaggatagaatccagtcactaggcttgagctacagcaaacgcttttatctgctgagctgttacacctgccctgatagctttttacagtggctgcaggagctcacagaagatgctgtttagagggtgtacgaagatcctttaggtcctcactgtggtcagatcacgtttccccaaattcatatgctggaacttaattgctagtctgaccttatccagagatggggccaccagcaggtatcaagtcagccaagagagtggggctctcagatgagggatgcagggaactgattctctttttgtacccctggcaggtccgccatgtgatgagtaacgattcagcaggaagataaagaacgggccttcatcttgacttcccaacctccagaactttgaaaaattactttttattatagattattcagtctcaggtatttagttataacagaacaaatacaccaggtcagtattctcagacgatattcttgccaaaccaccccggagtggttcggaggaagcagaccagggtggaggctgcggacactgcagacagtggctgaaaggggtttggacccccatcccaagacgtacagccagcccttccttctcagccttttgcccaacgctgacaggcaccgtgaagggtacagtttttcctgatgagaaaggatcagtatgagaattttatagaaagaaaaggccagctgcttggtatgccgggccactcgctttgctttgcttccgttggtggctccagcatctgagatttctgcaatgatgagaataacagaaacagaggcacaaccatgacttatgacttatgagttccaaaactagtgttccagtgataatgctgggtggaccactgaaaacagtaagtacctgacttccagcaaatcaagcctcaagaagagtttgctggtttgcctgttgtcctgaccaacctctttctgggttgctttcgggacaagcaggttggagcccagcccttcactatcccctgaggtcatctctttaaaaaaaaaaaaaaaaaaagcctcccagctgcaagggaaggccctgtttccccctcccccactgctgagatcttcagatctcttcattattgatgtctttgctcctgcgggtcatttcccagcctgaatcattctctgattatctgaccatctcctgggggagacaaatagtttcaaacattctcagtgactcatgtagcttcactaattcttctgtatattttgttgttgatgttttacacttacacacacacacacacacacacacacacacacacacacaccactgagcaagtcctagactaccaaattttcccctgtgcatgcccttatttgaattttagtttcattttatacaatagaaatgagggtctaattatttcttcattaaccgaccccaccccactcccccagaacttgagtttttcctgatgagaaaggatcagtatgagaattttatagaaagaaaaaggccagctgcttggtatgacgggccactcactttgctttgcttccgttggtggctccagcatctgagattctgcaatgatgagagtagcagaaacagaggcacaaccatgacttatgacttagagagttccaaaactagtgttccagtgataatgctgggtgggccactgaaaacagtaagtacctgacttccagcatctgctaaaggctcatctcttgccaacttgagctcattgcccggagcctgtcgcctttttgaatcctgtggcagccatttgggtgagcaggggctaacttgggaagttcttaaggcaattattttggtctctgctgttggttggtatgagaaccccaggctgccagcttacccagccctatctcgctggctttttccccaccccactgcaccctcctaatagactgtacagtccaggaacacatcataatcatagttgccaagtaagccaggatgctctcacgtcagagattctgaacaggctgttctctcccagcctgttcttctacctcctctccccggagaactcctacttatccttcatggcccgactcaagcattttttccccctgtatccaaatagcctcagatcttctgacccgccctgtacctaatgtacaattcagttacacaactctcttgacctcgggtcagtggagtgctctccatttgtaagaatttatttcgcaatatttatatatttttcacgatatggcgtgatgtggtaatagaaaacgtaggatgcctatgaagaaaccaactcggggactatgtggaatcgcagcagcctgtcactgttgccattttgtttctgagctgaggtgaatgttgccacacacctgtgctgctagctgaatcaggagtgtctgtcaagtgtccaagtctgctctgagtaacataataaatagttgttgttttaaactctccattgatattcttctatagtttaaaatatcagctgtatgtatgtacatggtatacagcttacatatcatacaaccaaccatttatataataaatttggtgatttctactatagagttgtttatacacacagttaatttgtaaacattaatctctcataccctttgacaagttctctaggggtatactctacttctagcccatcacctatgttctgcctgtctagacctgcctactctgaacatttcatataagtggaagtattcaacatctagccttttgtgttcctcctgccttacacaggtgggtgacactgtatctagctagtaattccatttatatgtcagtttagtgttgtttatacttgttgaggattttgcagttccataaagaagttttcttttatgggttatctacgtcttctttggatctcagcaactatcctcctagaacaagtcgagaggcagtccctgcttttataccttttgtgagtttctgaggaactaatattaattattattattttaaacatctgtgcaaactgttaggacctttttaaaaaaatctgtagataattctaaaattattgattgtaaatagagattactgtcattcaactattgtaaggccaacacattaagaaataagtccagtgagaggacagtttgttacttatggctcccaagaggaccaaacggtggggaaacatcaaaggccacaaggggaaatatcaaggcaggcagggactaaaggggtcaaggggaaaacaggggcacgaggctttagtgtagtctctgagggatgcatatgtgttacttggagcagtcaacactgtcttcccctctacctcctcccctcctcttctttaaaatgattttattatgatgtgtgtgtgtgtgtgtgtgtgcatgcatggcacgtcacacactcacagttcagatgacctcagctgtctccttccatcatgtgggttcccaacatgaaactcaggtccgcaggcttgactgcgagtacctctgtctactgaaccatcttggcaaccctcttctcttcctagcgcatgagtaactttaaaatagattcctatctgaggcaagtcatacaatctcacaatttcactccaaagggctctccctgcacgttcccgcctcttcctcaaacgccatcacgccaattgtattggctctctgtgtattggcctttccatgtgtttgcctatgaatttacacacacacacacacacacacacacagagagagagagagagagagagagagagagagagagagagagagacagagacagagacagagacagagacagagacagagacagggaggaggcagacttggttgcaaccttacatcagtgaggatcaataatgacggacaattttaccatcctattttgacgaacatgtagactgccaccccaagcttttaagaggagttacggagttaaaatgctcttgacatgaaactgctttctaagaagtggggccagtctactttcccaggaggcatgcgtaagaatgcctaataacacagtatgtggagcgtgttagttctaatttgcatttttatattactttgagactcggcagtttttcttctgtctctgtacagaaccctgactaatgccacatttactagacaattgtgttttcttcctggattatgacatggttggccttttgctggctttccaataagttctacttttgtgttgccacacttatttgcatgaataatatgtcatgtctattttcctttcatagtttcaattaaaaatattctttcgtatttccttcatgcatttaatttttaatttttctgtctgcagacaccagaaagagtgtcggagctcctaagactggagctgcagacagttgtaagctgccacgtgggttctgagaatcaaacctagcagaccgttctcttaactgctgatccatctctcgagcccctgagcatttaatttttgtacacggattttgatagacttttttcacatggagctgcagagatggttcagtggttaagagcaccaaatgctcttctagaggtcctgagttcaaatcccagcaaccacatggtggctcacagccatctgtaatgggatctgatgcccttggctggtgtgtctgaagagagcaattgtgtactcatatacataaaataaataaataaatcttattaaaacatataaccaagtgtcatgttaataaaaaacaccccaaatcatctctctctctctccctctctctctcatttttttttcaagataggatttcactgtggagggttatcctggaactcattctgtagaccaggctggcctcagactcaatagagatccacctagccatgtactttttttttttttttttttttgatcagataaattcccaggtagcttaacacagaaacaactttgtaagattgcttgagagaacaaggaaggacagatcggggagtttggcatcactgactccagggatggaacaggcacccctgggaggagttttgagagacctggttcttctcactccaggtttacagccattccttgtgcctctgggccgagggtgaccagttggtgaaaatagtggttaaatgcacacttaattcttgtgcgcgtgtaggggcacctgtgtgtctatgtgtgtgtggtgtgcatgtgtgtatgtatgttcccatgtttgtgtgtacctatgtgtgtgtatgtacctgtgtgcatgtatatggaagtccaacactgatgctgggtgcctgctttaagcactctctgctataattatcaaggcagaactcacagattttagatactccaatgagccggggagtctcctgtctctgcttccttcatccctcataccgggatcgcagttgaagctttacacgggtactgcaaattgaaaaacaccagttctcacacttgcgaggaaagtgtttcatccgttgagccaactccccagctcccatacttatttcttgacaatagttacaatatctggaatatctagggtaaaatatcatgtactaattagatacctgtctaacaaaatacccagttaatttatcaaagctaaattattttggcttgcagttttggagctgccggtccatggttgtttggctcttgttttggagcctgtggtgaggcagtagtgtagtcagcagtgtgataggaagctaaaaacaggaagaggaggggcctgggacctgcagtccccctttgagggcacagaagctaaaaacaggaagaggaggggcctgggacctgcagtcccctttgagggcacagaagctaaaaacaggaagaggaggggcctggggcccgcagtcccctttgagggcacccccccccccccccgatgatctaaagacttcatgttgtgccctagataggccaaccataaaagtctccaccatattcctagtgttgcccagaagggtaaagatctaacgtatgagcatctggagagcattcgagaccagaactgcatcagatcttactgtccctgggcttcagtcctatcatctggaaaatgggaccaagcctcagatcgcagttgtttgaaacaccgggagataatatatagacagtgtcaagcatgctatctggcccacagttggagttttttcccccttaggcagggtctcaccagttaactctggatgtcctggaactctctatgtagaccagatttggctcaaactcacagaaatctgcctgcctctgcctcctgaactctccacacccggcctccatagttggcgtttaataaactatagttaattcccctatttctcaatcagttttatttccccaggaaatcattcatattcgaaagaggaatgaatagtaccaatttcccaggaactcgaataaactttacacttcatgtgttagttttccaagtctgaaattcatgcatagctgagattcagcttttctttcacccagttcctctacgtgcacgtccaagctttctgttttgctaaatggtctcacgtcatctcctgcctgtgtcctagagtccaggcagaaggtgaaggaagcacccgctctgtagtagcatccatagcgttcaccctctctgtaggaacgttcatagcatccctagcttccagcctggcccggttgctggtgcgttttcattattattggcttgtaccacttactcctttacctttcctttgctctacctccccacgccactccctgccgcccccacaaacagctgctattgttggctgctcccaggattattcttgtgaacactgggaatggccaaagtcttcccagctggctcctggcttttttttttttttttttttttttttttttttcctttcccaaaactgaaaagttttacagtctctggtttttcacatcagctgtgctgtctgcattagagacagtcctggggcatgctcaaggctctgtgagtcagcccctcccttttaatcgtgcctttaaaaagggacagagagttcaaactcctaagacagaaatcacttagttcccttctgctactccatctctgggccttgatgtgtcttaaatccatggggtttactctgtaccagagtagggagtttgaggctagcctagctagatgaacagtgtgcagttgttttctaagttatcttctgtttttatttgtgtgtgtgtgtgtgtgtgtgtgtgtgtgtgtgtgtgtgtgtgtgtgaataattcttaaggagttccagacttttgaaaaaatatcactgacaaaaaaaacctcaaaatgacatcaacagcaaaaaagttggagaagtgacatactcttagtaacattccattttgctctgagtaaaagatgagggccgggtatcatctttgattggtacagtgtcggaggagagcagttcacatcaaaactgagaaggagataatcctagaagaaaggaacatgcttcaagcagaaggcatttagaataggaactagctgtttggtgtttcttcctggctgtatccaagactactgaaaagctctaacaagcctccctctgagtgaagagctcgctctacatcctcctcccagtttactgtgagctgtcctttctgatgctgtctttattgggtcaaggttgtctctatccagtactctcccctgtcatttcagctatgtttacagatctttctcctggcaaaggcaacagtgccacttgagagagcctgggccatcaattctgttagcctgcgtgtcacaggagctggtggtggcaagggcaaccgcagcagcagctgggagctccgaaagaacagccagctgctcactgtcattccagggctggctcatcatttatcaggcaaaggggagccttgatgccctccctgcctcatccctgtcctgctcctgacgcaggtggaggggacccagcacctttcatctctgtgccatttgtcttattctctccagggatgctttgtcaggtctttgtatcagacgtggcccaatgtcacacacaaaatgcaggtccacacagaggggttcccactctggctttccttggctctctctctctctctctctctctctctctctctctctctctctctctctttctctctctctgctgagttttcataactaagataacctgcaactctaagtagtcaaggttgccctcaaattcctgattaacctacctctactccccaaattccaggattacaggtgtgtaccaccaccccagctttttgttgctgttttgaggcaggatctcatatagctcaagctagtctcaaactccctatgtagcccaggttgtccttgagatgctagtcctactttctcttcccaaaccctgggattacaggagctgagtgaccatgccgggcccagattttcttaatcccaactacaaggtcagcaaaagccaaaggaagaagaaatgttaggtgtacttggatgttccttcgctcctcctcccctcccctcccctccccttcccttccctcccctcctttatccttcccttccttcccttctctttcctttcctttccttcccctttccttccttctcttccattcccatccctcccctcctttccttcttataattctttttttatttctttccttttccttcccttgttatgttttatcttttcttttcttttcatttcttccctttatctttctttacctttccctttcctttctttctttcccatttcattattattttctcctttctttctccttaccttatttttatccttctctcttttcattttctttctctatttctctccttttttaattcttttttctttcctttctatcgatttttccgttttttactcctatattaagattcttacttaatttaatctcttttcgtttcttcaaatttatacctcctcatttttttgtcatactattgccttatttctcttatatattccttttttatcttcactattctacgtgctttcgcgttacttagttacgttttccccatttcctctcattctttctcttttactcttatctctcttgctcttcctatatgttttttacttacatttttacttctttcttctcttgtagcgattctccattttggctctttttgtcatatttctttcattttggcattcttcatgatttttactcttctgtcactcaacatgttaattatttttagtccttcttgttcatcttgatatgcatctccttcttctcttctctctcatcattgctatgaattcttttctacctnnnnnnnnnnnnnnnnnnnncgcgggcgtgcgtgcggcgtgggtggcgtcgccggtgcttgggcgcgtggctgtcgtgcgcgggccggtccttgcggttgcggtgtcggcgccgtcggcgccgttcaggccggttcgttcgccggtgcgtccgcgcccgctccggtcgtatggtgcgcaccctgcccgtcccgttttcatcccgtcgccggggcgtcggtccccgtcccgtgtcgcctgtcgctcccgtcgccggtcccttccctcctgtcgttcctctcccgttcctgtaccttttctctcccctcccttccctcattcccctccccatcccctcctttctcctccctctcagccctcccctcctctcccctccccctcctctggagttctttctaagaactgctggtttcacagtgttcttctctcttattccagaaagcaatcaatcaaatcaaccacacacaccaggggtcaggactttaatctccctcacagaggttactgaatataatggtgtggaaagagaagccagttttggaatctggaaggtaccattccagccgtgactcctcttgctgcctggggacttggacaaatgagaataaaagtattaagagaagcctcatgggagtaatgtaagaattaaatgagattatgaaaatgctatgaaaccttttttaaaaaattcacttcctagtctcttttaggggttctaaagactagaaatgtccacgagatagcaaagccaccggatcccactaaccaagtctcatgaatttcttctcctaacaacagttccttctggagttcaggctttagttcttactcatgtgtgcacacaaggaagctaaggtttcctggccttaggtagacactacacccacagagactcacctacgggattttaaccagaactgaaacaaggacagcaatggaaatgctaatgtagacagggaaagcctcatcgctacacaaagagctacagacaagggaggagagcagagagagccgagaggcagagagagagccttctccagggaggagcgcgctgactgcttgtccaggaccagccctgaaaccatcagacaaatgcatgcatttgggaaggaggactattggtatatgatgtaattatcttgtgatctcgaaagctaagagaagtacttttaaaatgattttctagtcatttaaaaaaaagagatcttatttttatattaagtgtgtctccacgtgcacgtgagtgcaggtgccttctgaggccagagatagagtatctccctagagctggagacccagatggttgggagccatctggtgcgggtgctgggaattgaactcgggtcttctgcaagatcagtccatactcttaaccactgagccacctcaccagcccctcctagtcgttttttgcatcgatgaagagctatgtgactgaagtaaggcaaatggatcgtggaagtaggtagtatatatctcttaatgggtctggataaattaatacccccaaacctactacggaacatcatagtttggtaacacaaaattctggagtactggttgctgacttctgtgatagcatgctttcctgtcaccaagagaccccaggatgcttttataccccacattgctggccaaggaaaagaacaaattttgaaaaaaagaacaaattttgaaaaaggtagcacacttcccattgaatgtgtcccttttatcccaccatgaagttgagccatggtggagcgatttgcaataccctttggttgtttgcatggtggtgcaggaaagtaccatgtatgacaaacaaaacagaagcctgtcccccccccccccccaagtgtgcttgttttgtgtatgtatccctttctgcctgccggaagtggtaccttcccctcagcggtgaagtattcctggctgatttcaggactcagctctgtacaccttcagagaacggcggctcatacttagggttaaatctttgtgccatactcttaacacaatctaaatatgcttcctttgaaaagcaacagtttttcacctgcaaagatcatagatgttcaaaatgactcctaaggtttggatatggttgcagtgtgttccccaagaggatgtaggctgggagcggtaaccagagaagatcctcctaagcagaagccccttcctctggctttctgtcttgccgtgtgatttttttttcttcaccttgtgccatcactgtgatgacgtttgcctgagggcctcttgagggctgaggtaattctagtgttatacccttctttttttttttttttttccttccttaagtaatttggcctcgcacaacctggtgaccgctgtcaccgctaaggaaattgtggcaggttgggggttacctcaaagttcggccgcgagcttgtcctggcgagtgagaacttactcccgcaccgccctctatgagctgctggggtgtcccctccactctcatacccgacgcttatcaattctgggcagaaccatcctccgtccgtagcaagtatgaccgaggtctgcgcggacccggtgtcaggctctctaagatgcctgtggtctatcctaatctgcccctgccctcctccttatatgcctcaggctcagggtggctctccttgagaccatggcattctgttcgactttgatgccttctaccaggcgcaccacggacaccagctacctagagatgtgcgtctgtcagccttgggggaaggccttcacgaaaagcaggagaaccagaccagcaaaaagtcatcctttccttttcttcctcttgtctgctttcgtatttagtcggagaaaaggagggaaacggatctggcccaagaaacccaacttttctggccttgaactatggtctaagattgaattgactacctctggtggggttctcttgaccctcctaataccctctagcctggcaggtgatcaacatgtctctcttgtatggtccagaaaagactcttatcagcggccaagaacgaggccccaggataaagattcctgaaaaccagaaatttaagtgctttccagagtccctgagtggctgttcatttctaaaagttcccttccagatgccaatccccgaaatacttgctggggtcttatccagaagtcctgagcaagattcgccctgtccccggaacaagtctgtgtaatgggtacctctgtaacctctgagccgtgagactagatttggttgtccgaagccaataagatttcattcttaagggcttgcatggaatttgtttttctgtcttatcacaagccacaggtaagactcgatcaatgatccaataggtaacggggatgcagcttgcagggggtggttctgatgctaaggccctgttcccagtgcctcagtgaaggaaggctaacctgcaaaaggcactgggtttgaaacccagcttttttgtctttgtgtcccgcttccccactaagaaaataagttagcgagagatgccaatttcccccctctggtctgttccatgtcatttctgtcacgtgggtttgagaaaacaaagcccttaaggatgacgaatacattcctgtgtcaaaatttacccaggggagtggccttggggaaaggtgctgtgtgagcctaacagcaggaggtgatttgtcctcctaaggtctgtccccattactcagattctactccagtggtggcatagagtgatattactgaggcccggttcatcttgggaccgagttcctgtccttggtcttttcattcaccagccacttgcattgctaagagtgcagtgacaagacttggaggttgagttcccgagtgtggtccgtgcatccgcagtgttgatcacgagcaccgcaagtcaaatccttccaacgaggctgttggactgtgtgagtaatttgggcctagatgaagcaggaggctcactggtcaaggtacagatgaaatgtaggcctgtaatccagcggggctgtggctggggcattgtgatggactacatagcaaggctgtctttaaaaggatacagaatgccgcccagggccttgtgtaaagccaagaaaccacagacccgcagcagagctcaggctgtagctcagttgatagaacgcatgcctccaacacacaaatctctgggttctacccccagcaccccataaaccaggcttcatgacgctgtgacctctgcatgctttggaaacagtatcaattatgtgtcaccgactggcctagaacttttcatcctttgcctcagtctcctgagtgctaggacctcaggcatgggccacagccccacagggatagaggacgattttgggaggactgccaccaagtgtttcccttggtaacatttacacttccccagctcccaagattttacagagttttctgtcctggcaagaagagtaaacttggccatgaacgttagccctgtcttctggggctattcccccacccctggcagtggagggcgcggctgcagagatgattacaagcacagaggaaggctgcagagcagcgggtgtgagtctcagtcaggaagacaggaggcaaggacgcacgcatctggcgagcccttcttgccagactgctaaaataggtaaactgagtaaaatgccacctttgatggtcacggtgttgatacaacccgatcccttccttcctaactccttcccacattctggcaggtcatccacacggtgcatctttggcctctgtcacggttccagtgtgactcgagacaggacgtgacagcatctgtataatcccagcatgtagcaggcagaggcaggaaggtctccagcttaaggcctgcctaggctatttattcagtgagaccctgctccaagaaaggtagaactggctatggtgctccacacttgtaatcccagcgctggggaagcagaaacaggaggatcgccctcagggtggtgcaccagctgggtctgcatagtgagttaagtgccagctggggctgtatagtgaggccctgtatcaaacagagaaaaggggaaggggtggacctatgaagcggctcagtgcgttacggagtttgtcctgtctctaagcctaacaatctgagatctatctctggaacctacacggtaggaggagagaacttactcccaaagttttcctctaacccctgcataagcatcctgtgctgtgcatgtgaaaccccatacctcccactagacaaaataaagaaatgtaaataagtaaaaataaatagtgtaaatacattttacaaagttatttggcctcaagtattttgttgtagtaactattgcttaattgcttgctacagttgactaacacattgctacaaagtttggaaagttcaaaaaaaccacccccacaatctcccattattccatcatccaaggggaacacatattttcatacgcataatttagctttccaaattttcattttgtatttgctcttgccttagacatcatgaaggatttcccagttacctccaggagactgtaaaatgaagtatgtaagagcttgaaagatacgccatcgctaagcatatccaatcattaagcattcttattatgattattactatgattatagtaaaactataatgaaaccttccttgtggtgtgattctgagatgaacatctgtgaatgcaaatctttgcccacatctctgattatttatatttggaagattttcttgttttgtttttgatcatgcacacgcacgtgtgtctgactgtgagtttgtgtatgagtgtggtgcccttggaggccagaggtgtcagatcctcttggtgctagagttccaggtagccgtgagctcgagaacaggagagctgggtaccaaactcaggtcctcagcaagagcatcacttaacttctgaaccatctccccagctcctttatttcctttaagaggaatccttacaaggaaaattccagagtcaagggatatgcaaatggatccgaggtgaggaaggaggatggagaaccaaacctctccaggaaggaactgcctggtcgcacccaactcttctccctaatgcctcctggacagaattacatcgtgtacattatagaatccaggatgtggctaaagtagagagactacacacactcagcttgcaattcacagttgagacacctttctttcttttttaaactgaaaaaaaaacatctttttttaaaaaatacaatatacattgataaatgtttcccctcctccagtttcttttatgaaaaacttctctaatttaggcgagtcagttcctgagaaggctcagtgggtaaaggtccttgccaccaaacttgatgacaagtttgatccctgtccctgttggctttgggatggaagctgagaaaactcatttcagagacagaagcttaaaaatgaaaactttatattctgaactctcaggaaagcagttagtttgggttctgaactgtgtccccatagggagattgtacattttcaaaggctgggaacacaaagtggcaggtgggggaacagctgtggtgttatccaactgtgttttgacgttatgggggtaccccttagagaccgagctgtatccagggcaccttcaaggtccttaattcattctcctagacagtgtctggtgctcaaagtgataaggggacaatggagcaggtcagctgcatgtagttaactatcacataacaggcaataggttatgtatttttataacttatgcacctttgtttagataacagcaatttctctactctctaccggttaacagacaactaagaggtgggataggtgctcattcctaggcctggcaacatgaacttgtttaaccctgccagcaagatggacaaggtgtccttgaaatgtctggactcagacaactgtccccttacaagttgtccctgagatgtctggactcagataacagtttacagcagaagctgttcagctattgggaagtgcccagctcctctaggaccgggaccttgaatttaatttctccccatgatttaatggagtctgaaaacttaatggtagtacttaaagtttcttcttttgcttgttcccacacagccccgtggtggaaacacagaactgactcctcaaagttgtccctccacttccatttaagtgctgtgatacacgcatgcccttccccttaaaaaatgtaattgaaatttttagcttgatgggagacaaatacttcctcagccactcttgtttacagtctgggattactgatggacacaacatttcctccccaagtctccacgggccgttgcatttcttctatggtttgttgagttatgactcaaatatgatgcatcatgactttcaaaagtatttattttttttaagcctatgaaacttcaaactgcatcatccaggcagcccaaaggaaggactcttttttttttttttataatttatttattgattataattaagtacactgtagctgtcttcagacaccagaagagggcatcagatctcattacagatggttgtgagccaccatgtggttgctgggatttgaactctggaccttaggaagagcagttgggtgctcttacccactgagccatctcaccagccccaaggaaggactctttacatgagtggatgtttgtgttttcatacgaccacacataactcagagtgtgttttctagtaataagaataaatggaatagcagttccaaacagagccagcctcaagggactaaaaggttctggagaactgacagggtagcccagaaacagaaattaaaactttttaagggttcgccatgcgttgcccaaacccagccttcctctctgtgcttcagagcattttttattggccagttttgtcataacctttgcaatcccatcttttttgaaactgaagaggaagaatgaaacccatcactgcataaaccagaacccagacattaattagagagttgtccgcttgggcttttgttaatgagcccttgtataatcatcgcccagttttcaccaagtgtgaggtctcagttaggagaaattgccgtggtctccctaagaataaaattatagaacgctagagaacacaggcaagaaatgtcagtttgttgttagagaactaatatggggagtcactggctggaatctagcatttggttggctctcagtgagccagaaaagcttctcaagttttctttgtgaggctcaggagttcatcttccagacccaagcgcttcaagttctgaatggggaaagtagacacatttttacctcacgataacaatgtttaaaactgttccatgtttggttggttggttggttggttggttggttggttggtttagggatggaaatcaaccacagtcttccatgaagcctgaaataagtgaatctgctctccttttttatctgattgatgatcttcatcagcacagacagacatctagatcacgttcaggtaataactgattatgcactctttgctctgtcaataactaattacttgactgtgttaatataaccaaccttcgtgtgcacagttatacagatttggaagaactgatggtgtgattaaattgaccttcacagtaatttatccgagtcacattcttcacaggtcatgcttgtgaataggtagctcaagcaagccccatcctcctcttttaaccttaggaagtacgtgcatcataggaccctccaacccccaataattaaaaccttggcatggcttctgcataaagatatgtgaattattacaggactgtagatagatcactaccttaactaatcaactgcagttattaattaaccccgagccatcttaacaggagaaccaccaatggcaagctgatgagagttatgatgtacctagggttaaaaatcattcatttcttctggcatgcatgtatatgaagagattatagaaatatgtcaattcaaggaactattgatttttgcaccccccagtctcctacatcctatgatgtttctgactgcaagtagtaatcttcgttgctacaatcttgcttgttcatttaataaaaattttgaaagttaagcattaagcttcaactgatgttatagactgtatggttatgtcctttggatcccaaaattcgtgtgtttgaagtcctaagttcccaatggaattagtattttggaggcagggaacttttgggaaggtaatttcttgcttagacttaagtttatggattcaaggtttttttccaattggttttatggggtggtaggttttggaatacccctttnnnnnnnnnnnnnnnnnnnntgcttagtaatgggctccaccatcccaatctcatctcaggtttgcctttactttccaaaggaccaccataccacaaactccaccacaatactcccagaaggaaggcctgataatcactctgttctgttcaacctaacagggtaaaaatcttcaagatgacaagtgttcgttgtagataactgcaaatatactgtcctctttcttcaaaatgaaaacttgtgctcttactcatccaggtaagggattcaccttgtgataaaacaaacaaacaaacaaaacataaaaacacccatcacctcatacaagccgctgagtactacttccacatccagttgtgggctgggcaagtggaagatgcaaaagacattaactgagggtctgcagacatgctttgtatgctgtaaagccacagctttttttttttttttttctttttggtttcgagacagggcttctctgtgtagccttggctgtcctggaactaactctgtagaccaggctggcctcgaacccagaaatccacctgtctctgcctcccaagttctgggattaaaggcatgtgccactactgcccggcaaagccacagctttaaaatacagtgtgtcccctgtgaactctataatgcacgggaaagactaacttgggagaaaaagaaacgaatgttacaggttacaggacagtattgcaattagctgttaaatgatgaagattcaaggaagaaccttttaagaatttctgagagggttaaggaaaagacaccatgcttatcatgtgccacgccctgcctacccccccccccccctcctaccttccccccctcccctgtgcagcaggcactgaaaaggcacactctcttccaatagccataacaggaccttgaagtcaccactgtcattctcttcagtttcaggagaggacagaaagtagaaaggttaactagcttgctcgtaacaaatccaggtctgagcaaaatgaatgagagcattgtagagtgtaactagggagaaatcctcccactgggagctgccccttttcccagcctctgtttgcattatttataaactcagggctggattccagaaagcatggtccttagggaacacagctaactttcaattcaggcttaggaacctttgtgaatacctgtcctttcagccaacaggaagtcccctgggacacaggtaaaggaagcaggatttcttttcatattgtctttgaacaatgagtcctgtggggtaatgcatggttgtacagaaatagactgacccatgaaacacagccctgtttttacagcagctgaatcacttccaccctcccgttntgtgcctgtttacatttcttccccagctatctttctccttgattgcatttggaacaccctggggctcttctgatgaaatgtttccttgaattttatcacctatcctgtcgtcataaagactttccagggtaacagtttgcaatatcatccatacaccctgacacaatgccccaaggtctagtctcacttgggaaaacataagtatttttcatgttcagagaaaagagataagacttgagaggggaatggcccttcaccaaatctaacaaggttagggagtgtattagtcagggttctctagagtcacagaacttacggatagtctctagatagtaaaggaatttattgatgacttacagtcggcagcccaattcccaacaatggttcagtcgcagctgtgaatggaagtccaaggatctagcagttactcagtctcacacagtaagcaggcaaaggagcaagagctagactcccttcttccaatgtccttatattgtctccagcagaaggtgtagcccagattaaaggtgtgttccttaaactcggagatttaatcttctggaatccatagccactatggctcaagatctccataccaagatccagatcagaaacttctatctccaagcctccagataagggtcactggtgagccttccaattctggattgtagttcattccaaatatagtcaagttgacaaccaggaatagccactacagggagtgtcctgtgttctttcataaggtggtcagtctgggacaaccacaacaggagaccgaaagggggctaaacagagttggttttttttcccagattctggagacagaggcatagaatgccaccattacaatgtcacactatttccacagtgtagttntgtgtgtgtgtatgtgtgtgtgtgtagcatgtgggggtcataccacatactcaaaacttccattttgtttgagacaaggtctcttgttttcctgttttattaggccaattggctcatgagcataccaggggttctccaatctctgcctgccatccctccatgggagtgttgggattacagctgaccctacaagtctagctttccctttggttcttgggattcgaacttggatcctcccacttgtatggcaagtgcttttacccactgagccctctccctaacccctgtttagtttagtgcagcatttcacctgttacaagaacctgtggtatacacaaacacaagccacaaattactaactgaaatttctgtgattccatatatcagttaaatatttttatattggtattatttttttaaacaaaagtactatagaatataaggaagaatggaaatatttatgctaatatttttaaagggtttgggattaaacctcatgccttatgtacgctaaattctactactggactatacccctagcataatttaaaggaaaggactttctattttaacatgctcatttgtgctgttatcttgctttttaaatacttattcagaagtactgaataaaaaaaaaggaataaaaataaaaggacatggccactcctaggtatgggagagaaggaggtttattgtagattaacaggagaacatagtcagaggcagagacatctgggagactccagagtgaagatgctccgtacatccaggccatgtggtggggagaggggggggaggagagtgaggagaataaagggtaggcaaaagatgaaatgtaaccaaaatggctggattataccagaaagaggcagctgaggggaagatccacccagctccagggctggagaagtttagggtagcaggtagggtatggcaaccattctctgtaacagatagggactgagggatgctgggagaatttggtgacctccttgatgtattaaacaggtgccttagttagccactcgtcccaggtttgagacctaacaaggacctggatttccctttgcattgggccccatgaataatgtaagggctacctcctggctgctacagctgttctgtttaagaaaaattgtcaggaagcactgaagtggttgcctggacagtgatgatgtcagcttggctatagctcagggatccttagttagctggacaagtgttatttcaaggtgtgtcttcgagggcagttctggcagagattagcattaaaaatcagtagattaaatacataagatagttgtcggtcatagggcaagcatcattcaaccctcagagagtaggaccacaagataaagatggagggaggggaaattcacccttcctagctggaccatccatcttttcagcccacagatatcaaagctgctggttcgtaagccttccggctgctctaggagtgacatcacctgctcttttgtctttaccacctaaaacctgtctagtctgccttagctgtaaaacgagtggttagcagaatatttctaatagtagttgtgaagactgagagtattgtggctgttaaatatgaagccgtcaataggcattagccatgtcagtatcccaaagcccttagttcacttgactcttcacggctgaaagtgtgtgtgtgtgtgtgtgtgtgtgtgtgtgtgtgtgtgtgtacagcagtgagataacaggagctatgcagtaagaataggttcacgtatttctctgcaggaggctagtcatgagctcagatctgtttctcatattgcctgaaaaaggacagaaagtccatcttatataaagtttgtgagactttctaggtgtggtggtttaaatgggtttggccccatagattcatgtgtttgatgcttgaccatagggaacgacactagggaggaggtatatagctttattggatgaagcgcatcactgtgtaagtgggctttgagatctcctacgctcaggctctgtccactgtggatgagagcctcctcctggctgcctgaggaaggcagccccccctccactgcttgcagatcaagatgtagaactctcgtatcctctagcaccttgtctgcctgtgctctgccatgtttcctgctatgatgataatggactaaataagccagcttcaactacatgtttttctttataagagttgccttggtcatgttgttctttacagcaatgaaaccctgactaagactctgggtaacctgtggggacaaattgagagtttttcttcctcgttttctctttattctaaccatcacccatattcattgacctagttattactagttgtcctaaagagcacatagaaagggcaaggcattttactcttctgtttctcagagataagtgtttactaacttaaagacacacgtaaaagcaatgtcatggttgtgtgttttgttccttaagtggaagcaggaaggagacaaaagggttgagaaacctgtgtatatgtgtaagggaggggaaatcactacttaataaagaagcctgcccgccactgtccattgtgctactcagagcagccaaggtgaggaaaccacccatgagtccatccatggacaaatggatcaagaaagtgtgcgcacacacaatggattattattccaccttaaaaagaaggaagccctgggtttgacacaaccgatggaccatttgtgacacggaggaaaggcagacacagacacacccaccgtgtgagactcataacaacagacaggacagggttaagtctagctggacactagctgcccatgtgaactgttcttcagctgccattttgaactggtaaaccaatctgtggttgtgagtcggaaacacggaggaaatggagaggattttccctccttccttttccttttcctttccctccctttctccttccctccctctattactttccttccctcccttcccactttccgttcttttttccttccttctatcttcattccttttctcctccttctctactgccttctctttcttcctctctgtataacccacactgctctggaactcattatgtagcccaggctgcccttagaagccatgatcctcctgcttcagcctcctaatattggattacaagtaccttgtctgcctgagagattccttgaagttggttgtcatataagtctgtcgcaggattttccctgtccaatcacgttagggcagtgggaggcccgtgattggacagagaaaagggaggcagtgctaagagttgcagagagaggaatctgagaggaggagggagaaaggaagatggtggtagacattaatctgtgtggctatgaccagccacaggttgttaaaccataaggttagactaattgggataaagctttatcatcaattgtctcttaaattattgtattggcatcttataaattgtgattttattgatatataaatctgattggttaactataagcttaagagatttgattttaccaggtgagtgggtattgtgatttctaaccacaaggttggtggttcaatttgattactggaatgtgggacacctgatgacagggtattatagcggagagggaactagtggctcccaggacaaacgaaccaagatgttgcaggggctagctggagagagtagctcggctgcgagaacagatggagtggtacctcactgagacaaagggctgtggcctaccagagacagtactagagcaggaatgtggcccggcagggcaggagagttggcgggtttatatatatatttctttcgtgaaatataagtaagagaaattaccaataggaacatgactaggtgaagttgactgtatgtctgaggatgcatctgtggctttggtagattaatgatggctatgcatcctttgacattcttctcactgagaagtaggacctgtttctctcctccttggatctgggctgtgacaactttaaccaggagactgtggctgaagggattgggaggttgtagcatgaaatataaaaaaaatcaatccatgctatcgccggcaaggcactggcctgctttcatctcatggaaactctgacccagagctccgaaatctctccattcagctcactaagttcccactggcgggccattaccatgctatcccatgctttcaaatttccatggccttttggggtgcacttcttgcaaacctacactttgccattgtacctttagccctggaacccagttgaggcggctcgtgaaggaaaacaccacacaaagttccgaatcaacaggtaactcaattgccgggcgcagcaaatcctggcagatccgccatctaaactgggggcctcttgttagctacattctgtcctccaagctctccccgtgggaacttagcgagctgggtggagagattttggaacttcaggtcagagagtctccacaagatgagaacaggccagtgccttgccttgccggtgatagcgtggattggttttctttaatatttcacgctacaggaagcctcgggaggaaacaggtagcttgcacctgaggctcttgaagctttgaagttctctggcagacattttagtaacctgttgtagggagcaggtggaatgccggagaagaggaaagtcccgctgaatgtagcctgttagctgatcctgttaagaagcaagggtaggaacaaaaccactggatgaatgctaccaaatagccctaacaacaattgcataattaattccctggctcaactgatggctaaactagaaagggagagcacccctcctaattgttgcgtggatagaaccttcctttttctgtttgtgcagtctgcgtcttgaggtcattaagaacaatcaaggagggtcatacaccacaatgccttcctgcctttgcttctttcaaacaagctgaatcatttctgcttctagttgtgtgggtgggtaaggtgggggcctgtttgggcagagacaatatcaatccatatgccacgcttccaagcatctatattaccattatgtagaagaaaggagaaacacagaaacatttatcacttttaatggcttgcatcttatccttattaaatcaaacacaatttttgtcttaactttcgtatcctctctctgttcagaactgtatacttcctgtttagctgtcatgctggttggacgcatgcccactcatcagcataaaggacaggaagggaaccctccttttctgggctaatggctgtatttacttttttaaattaagatgtagcccagccttttggcagattgttatcagaaagaacagcttagcatcaattatgctaagacaaaaatcattatatttagcagtcattgtctaggttttaaaaggactttattaaataacccaagataaaaacttagtttattcaactacttggtgcatttgctggtaactcatcctggcagaagcccgatgacgcaattgtgcttggagagaaattctcaatagaattcatagtgaagttcttttgtggtcagtatgagcaatggatagaaggaatgttccgggactcttgtgggcatgtaaaatttctctccatatatttatatgatatcaaattctatgcttttcaaataggtagccatattccaaacaggtttatacgttatttattgttcactgaaaaacatctttccattgggagttgtagctcagtgataagagtgttttaccagcataggtaaggtccagggtttaagccctggtagctactaatacaaaagaataatactctgcaaccattgagttgactgtgtatcttagtttggttttttattgctgtgaaaagacaccatgaccactgcaacccttataggggaaaacatttcactggggctggctttatagtttctgaggtttagtccattatcttcatggcaggaaacatgttgacatgcaggcagagaaggagctgagagttctatatccagatcctcaggcaataggaaaagacagtgacatatttcctccaacaaggcctcacctactccaacaaggtcattcctcctaatagtggctctccctatggacctatgggggccattttattcaaaccaccgcagtgagtgttggaaaacatcagaacattttggctcattaccctgttctagcacaggctgcttccatttcacttctcttgaataagaatctaaggtttggctgctacattattttttctctgtctcccacatggttaggtggagggtctcactgtccacctgcacagtgacacacttcttccaacaaggccactcctccaaaaagtgccactccctgggccaagtatattcaaactaccacaaataccatgagcaaaagtaatttgaagagaaaagggtttatttggcttccacttccaaattgcagtccatcattgaaggaagtcgggacaggaactcagccaggataagaactcaaagagggaagaaacctggaggcaggagcggatgcagtttatggaggggtgctacttactgggttgctcctcatgggttgctcagcctgctttcatagagagcccaggaccaccagtccaggggtggccccacccacaatgggctgggccctcacacatcaatcactaattaggaaaatgttctacaaaatgcaggctttgcccacagcccaaacttatgaaggcgttttctcagttggggttccctcctttcagatgactctaaccgctgtcaagttgacctaaaattagccaacacaatatatacccacatgtcttagtcagggtttctattcctgcacaaacaccatgaccaagaagcaagttggggaggaaagggtttattcagcttacacttccacattgctttttatcaccaaggaagtcaggactggaacttaagcagggcagtggacaggagctgatgcagaagccatggagggatgttctttactggcttgctcagcctgctctcttatagaaccaagactaccagcccagagatggtcccacccacaaggggcctttcccccttgatcactaattgagaaaatgccttacagttggatctcatggaggtatttcctcaactgaagctcctttctctgtgataactccagctgtgtcaagttgactcaaaactagccagtacaccacatatgtctatatcatttgagagatgagatctatcactaaaccacaaatgctatttttcttttacaaaactaattaattattttgatatgtatgagtgttttgcctgtgtgtgtgtctatgtaccagattcatgcttggtgtacacagaggccaggagagggtgtcagatcccctgaaactgggctgcacgtggaagcagagactgtatgggattctatgcaatatgtcaagaaaataaggggtggtggtggattatatagtaggaaatattaattttccttcttgccttaggctatttatattctcagatgagagacagccttagattgttaaatggccttaggcagcacagtagctgggcagctgcctacccgccatgctattagaatctgctttcctattgataaccccaagttatcactcagtatttactacattccatctgggctgctcttaactcagttgggtagccagccctctgggccactttgtcctggcccttagcccgtgacagctcactttctccctcctgcacgttcttcttcttcttccatggcggcttcccttcctcttctttcccacctcgaggtcctctttctaccaagcccaccctatctatgtctcttctgtccagttattcggtgttggcatctttattcaccaattagaattaacgtggggtggggcagggccggggcaaggtcccaggggctatcggcagacaccaggtcttgggggccagcgcttagcattatagcagatagtaaaagacaaaacctcaagtgttgtgactcagacacagaagttttccgtctttagtgactgttgacaatccctttacacgctggtccttcacacactttgcacttctccatttcccaatctccccgcttctttctccttcccttcctaaactgttatgtagctgccagtggacacgggtcactgggttcctgaaaggaaagccaggattggatggggaggacaccaagagacaaagagccaagacaaagttctcagagcaaggctcaatctttaattgtagggtctgatttttaaagggggggacacccatcccccactatgccaggatcttgatgtcacttcggatctcatcaggaaagctagctcagctgctcagcgggtaggtttttgtaggaaactggcagacaaaagatgttacctaggtcagaagactccaccctaggtgggatagcctactgtggcagaaacaaagtctgattcagcccacctaagactggggagaagggcacactattacatttttagtcttcttcagtctgtgacagtttctatctagttcttgctgcctctcgaccttgacagtcttaaaaaattttgtcaggtgctcagcagattttttttttctcaatttgaattcgcatgatgttttctgctgtaatgattgaggttacaaattttggcagcaatattttggaggggagacacccttcttatcacatgaaagcaggtgataattatagaactttttgttgttattttgagacaaagtctctctgtgtagcccaggatggcccctggaattcacgattctcctgttgttatttctcagggtgccaagcttatagcaggctttagagactacagtgtgcttcttccagactttcactggtgatctttaaccgtcattacttgcttaaggatgtaacttgccatcttgttgagtttgctctgcaccccttttcttacatttttacacgtctttttttctgttaaatgtgtgtgattttttttttctcttattattcaagaacttagaagggccaggaatggtagcactcacctacaagtttgactaccagcgaggctaaagcaggataatcacaagttctaggtcagtgtaaacaacttggtgagctcctttctcaaaaaacaaaccaaaccaaacaaacaaataaaaaaccaagcaaacaggaaaatggaatttaaaaaaggaggcctgggactatagctcagtggtagggtgctttcctggtatttgtgaggatataggttcaattcctagtactgaatacagcaaagtttaaaagtatcttttattcggctgatgtaattgtcatcttggaggtctactgcctcagtgtgctaacccgggccttgtcctggaagcttctaggctccataaaatcttctctaggcctagaatgttttagcctgagacatagaataggctcatcctttctagctctttctgaactctgattggctggttcaactctgctgttctggctcaaactcctctccaagatgattcaaattggcttctctctcagtctgacttgttgctgtgcttggcctcaaactaactctggcaatctgtgttgcggtaaatctctaacccaatatgccctggcaatgaaaacacaactcaattaatatgaatacatgctgtgaacctagactgggcagatctactgctactttaccatcttccacatctatgagaccccttagaacttgtgatttccccaggccatgtgcttctgctctgcttttcttccttatccttctcccctgtgtcctctccctcttccatttttctctttctttttctgctcctttcactctaccttcccttttatctgcccaatcatcagctctcctttattttacactttaaggtgggaagcaggtttacaggaaatcacctgagtgctgactcattccttgttcacaacccctcacaggagaacagagtgaacatcaaatataattagccccagggctatccacagcaaatctgttttaatcttctgtctcctccttctctggctcattctgtatttacctgtgtctagcttgtcctctctctgcaaactgtccgggtaaaattgtcctctttccttcttcacggcttcctttcctctctcctcttgtgagagttgggcatatccaattctgtccagtctttctctgattcgtcactttgccactcaactagatatcactttcaaacatgggtgcttcatttttacaaagtaactttacctccactgtttgggattaaggacctgtttgtattccagcaagagggactgaagctgtgtgctaagggctgagccacaccacaactagaaacagattttttttttcaataaataagaaaatcttggggttcatagtgtgatcaagtatccggcaaagtaggaagattccctcctctgagctaaaggtttaactctcctcttcctatagttgtgtatttcagtatgtttttgttttttctcctggcccctgctactgaaataaaaattctgagattcaaacctatttacaaatacctagttcattaactttgcctgttccttgactcacaagaaacattagctcataaattaattaccccattattctattctaaatcctgccatatgactggttacctggtcctcaggtttttgctttggtctccatcagcattctggggtcattctctcacctgtctctgtcccaacatattctctctctctctctctctctctctctctctctgctggatgtcccaccttttaacttcatgcctaagctcattggccaatcagctttttattgacaggtcaatgtttttatacagtgcacaagagatttatctctatactcatttggatgatcaccgaagctgttgttgacagttattcaccttttattgttttcctttttttaaagaccaatgattctagagctaaagataatgaaggaccctctgtgtagctcaagcttgtgcaaggaggtgacagttgggtgattcactagcaatattttgactgccattagaagaatagagtcaatcatacatggttgtgtggtgtactggaaagagcaggagatcagagggacttggttagaatttaggttttactctgtattggctgtgagattttggatgatacaattgactttcctgcttctctagactgcaatgatttgaaatgctaaaaagaattcctaccacttacataaaaacactgtcagtaagacagctagtgcctgcatagaaaccctggagtatattagcattgtaagtttgcacatacagttgaaaggtgttgaggaaggagatttataagtgtctactgatatgtttatagatattttattttcaactggaggtactggtagaaatattctttttctattgtcaaaaaatttttttagcacacacatcctttttgttacatgtcacccaactaattaatgagtttattaattgttttattttatgaagtaatttgtgcatgtaggtgtatattactgggagttgaactcagggcttaactgctagattaacttttgactagcttattatagtcaggctctcatggagttttttctgttaagattcaacaattcatttactctttcacttagataacgtagatcacctgttctcaacctgtggctctgtaacaaccctttcacagtggcagtgtaagacttatcagaaaacacagatgtttacactaggatttataacatagcaaaattagttatgaagtagcaacaaaaataattttatggttgggggacaccatattacaaggtcaaagcattaggaagattgagaactactgccttagagtttttaaaccactctctctcttttttaatgtaggagagtgtgcctcttttcccacagcaaacatggcggaacaaacttcaacctgacgtcttgcgccctcaacaaagatggctacagcacttcctgctcttgcctttaacaaagatggtcgcaatacttcctgtctaggacttttgccctcaacaaagatggtctttatggtacaggttccctagcagtctggattccggttgtagttttagttattctttttttttttttttttaaacggtacgtggtcgcagacgtaagtaagatgactccatcttctctcgctgtccccgcgccgtggcgacatcgcccctgcgcggctctcccgggggctggaccggggttcgggtggcggtgccgggggtcggtttcctccgagaggacagtctgcggcttcatttaccgtgaaaatcgtcggtagctctaactgtgccacaaccacggctttcagctgccgagacagggaactttttacaagttccaaatggaaacacgctgccaaaacaaaacaaaacaaaacggtcacccacgccctcctcacctgccacctcccgatttggcggaagatcgcgagcaaggctgggatccgacgtcccgcttgtgtgggctgagggtggcagaagccccgcccgccacccttgctccccttgccttcattgccaccgcaagccaccccgcagcacactagcgacctgagctcattcagtgtcccatgcatgcgtgctcacggccctactgcgacccacattccgaattcttgtgaggcttatcggtaaaggcacacaaacactcattttcttgagggtgcttgtcctttctttgaatgctctataaacttctttcctccggactgtcttctattgctggtcagggtctataaataaatgtccctggtgctttttagcagtttctaaagcgtgggtgctggactaactctggcaaagcaatattgaaatccactattttctagcatttaattttatataataatataaatagattaataaatctgtaatccttagggattgcattttaagtaagggatcagatctgttttctgttggctctcttactgcacaaggaattgaaatagggccccattatcgtgagaagcagaggtagaaacatccataatgagtgtcgttcattatgccgggaagtgtttgaaatatccgtggtttggcttaacagccgcttaggaaacaccgtggctcagcagcctcttaagatataaagacctgactgatttttgaggtgctcattaatgagtttgcagcaatacactgactttgggggggggggtgtccatcagcattcctgaaacctaggtgctcattttggctctttccaggaagaaatggaagccagagacaagcaggtactccgctccctgcgtctggagctgggtgccgaggtactggtggaaggactggttcttcagtacctttaccaggaaggaattttgacagaaaaccacattcaagaaatcaaagctcaaaccacaggcctccggaagacaatgctgttgctggacatcctgccttccaggggccccaaagcttttgacaccttcctcgattccctccaggaatttccctgggtaagagagaagctggagaaggcgagagaggaagtcacagccgagctgcctacaggtaggccccaaagagatcccctcaaaacagctctggaagtgttgcaaccatgcccagtggattggaatttggtcttttaggagggaccagggccacgagcatgggcaacggtttggatgcagagggcatggcgtcggagggtcaagacgaggaggcggtgttaggaaactcgaggaaggaagggaacatgaaccctgaggctgaggggttaaggagggaactgagagtacaatttagacatgcttccaggggaacttggcaagtcacatgggaggcttgttctcatcggagagccaggtcaatctgagccctttggcaacaggaaccgtttggaaagcgcagatgggaatgcaggctttggcctactgataactgatttgtggggtgccaagctgccagctggaggaggtcagatcatgggagacagcctctaggaaggcatgtcctgcacctgtccccacagccagcctccaaggccaaggggattattttgaagcctgcctttagtttgtttttaaaggctgttggtgtaaagtggccctttaaaattcagctctgtgcagacacctggggaattttattttgcaagggcagtaatttgggggtgcgaggggggggcggatcttattttgatttttttccaggaaaaaaaatccctggaagcagtgatctgaaaagaaacagcttggtgcttgtgagaggaaggtgctgcggtataaatcactgttttcttcaactcctcccagatatactgctctttcacaaagatgagggactgacctagaaagattaatttttttttttaaataataaaatggaaagttaaccaagccaaaccaaatcagtagatttccagagttaagaattcaacgttttctggttttcagtatagatatggaccaagtcagtggtctccagaatttattgttaatggtttttaaaaatgactgtaacagagctggtgtgtgtgtgtgtgtgtgtgagtgtgtgtcagcagcgacattggtgtcctgcctttatggaggcagaggcaggtggttctttgtgagcccagcctggtctacatagcaagttctgggatagccagagctacatattgaatccctttctacactcccaattttcaaataactgtaattggtaacaacaacaacaacaaaaaaaatcaaatactaccagtaaattacttttataatttaaatgtaaaactatgggtcttatattttgaatggttctgagagcacatatgataattatttttttaaaattaatgacatatatctgaatatttgaccagaatgggatagccagttaatttagaaagacctggtgaacactcagtggaaaatctaaaaatatctttattcctaggagcttgtccaaattacatgtctttttgaaaccatgagaatgccggcctttgaggacctctagaattttcagcttgggttgtccttagaaaattacatattccatgtgtctgaacaaaaccaggaccaagtatccctgacatttctaccacattattacaagcagaatatataacatggagttgcggagggaacatcaatgagttgtgcctttctggtattcacatcgaaggctctcctggccgcacgcagttggaaatgacaaaagacccgaatgcttttcactcccaaaatgttgagtttaaccaggtgattattttgggttatataaacgttgtcatgaattgtcatagacatgagaccctcattctcacttcttcaggtttattcagagagcaagagagaactaagatatcctgaagacattaaaaagttaaggagaaacggaggggaaaggcgcttttatatctagctgtttatcttctatgtatgagtgctgcatcctgtgtgtcagtatgggcactgcgtgtgcctggtgcacatggaggtgggaagagagggcaggagccttggcagcagagctgtagatggtcgtgagatgccatgtgaaaggcaaagaaacccagtactctgcaagcccagccagtgctcctaatgccgagcccactccccagcctcaaagagcagctttataatggaagcaaaaaccaaaaaagattgaacatatctgtatatatgcttaggaaaccaggttttccccaagacttgttaactctgttgaagggttaaatggaaacctggcttgcctcacaacacaagtgagtgttgtgaattgtttgtttgtttattttataattaactctactagtgaaaaaattctgacctggggcttagatttattgatttcttggtgacatcaacccattttcaagtatgactgtagttaaatcttgactatttaaactaatactgaaaatacaagtaaggtagagatgagtgatagagtcaacacctttctcatgctcactttaagaagagcaatgctccacgcaggggtagtgctccctttggctggtgcttacagatatgggtgtttttgggttagtgctccctttggccggtgcttacagatatgggtgttctcgggctagtgctccctttggctggtgtttggagatatgcgtgttctcggctactgcggcagtgccatgcctgcctgtctgctgccaggttcctcgccatgatggtgatggattctaaccttctagaactgtaagccagccctcaagaaactaattctttataaggaaaaacaaaaaggcgacattatttctaagtcttactaataagccctggattcgaggtttgtcagtcattctcttctctcttcttcattggtagttttctagctcacaggagtctctttaaaagttattattgattattgaaaatctattatgccttagggtctagtggtaaatgtgtatatctatacattgtatatattttattacatcatatgccgtataccatatattatatatcatgtattatatattatgtgttattatattatatataataattatatatatagtgttttagggttagggtagaagttatatattttaaagaagtagatgcctaactgctttctgtcacttaaggccttaaatatttataagtgtctagtttcatgaaaatatgattttgaaattaggttgaggtttagtgaattggaagctgtgtgagtgttgggttctttttttagggagtagggggatgagcggaggcttagaaccatggaccagcatcagagctgaaatgccttccaacttaacgtctctggaaaaaaagcaaacaaacccagagtcctgtttcctgggacctccgtgtctctctagcacggtgtcagaactgggtaggcacacttgtgcttctgaaaaggctttgcaacccaggctcagggaaaaccgggcgtttgcgaggcgcgcacacagtaaccttttctagatttctgcttatgttggttgtggttgtccctggactggtttggtgccctgcggtcaggaagccttgagaagaagcgaggagtgcccttcgcttagccacgcggcccatccttcctcaagaacaaactaactttatttttattacagttttctgcttggctcctctggcaggctcttggtttcccccttgtttgtgtattaactttggtgtttcatttctatacttggagctgccgaggatatttctgtgttgtactagttatttgctttttgtatatacactgaatgtaagtgatatagagtaaaactgagttgtgtctcagtctctattcttctaacttcaagtctcaaccaatcctcagacagaaaagaacaaaaactacctgaattttctgattatatctcagaattttcttaggtctcctaatgtctgttttaaaaatccaagtataaaagtccgggatgttgagcagatatttggtttgcgtcttcctcaccccacaaggactcttaccttttaaaggaagaattctgctgataaaatgacttaatccaccttggcacagcggaagggacacttggcagcgcttcgctgcgaccaaggtcacacaccagacattagatcagctggaagtcctctctgggttcctgctgggtcactttaggagacaggacagcactgggtgtggggaaggcagcctgtgaccggtggcctgccttcccagcctggtgggtctgtctgagccggggctctctgtggtgcccaagttcatctggctgaagccctggcctcagtatctgatgggactccgcgtcaggcacagtagagtggctcacaggccccaggactctctgttccagcctgtttgctctggcctggctgtccggctgcagctctgccacgatcctttcttaacagtctccgggtagccttgcctttcaccttgccttccctttggctggggctttgtttgtctctcttttaccaacaggagttgtgtctatgctcagccacaagcctcccgccctagctagcatcagatacttccttccttggcccgtgcagtggccgccctgaggctagcccttgtttcagccttgcctgagtttcagtgggtcatcctgatggacaggatgtccttgattgccttgccgtcctcatgggtgcaatacacacagggctggcttgcccgttccttctctgctcagaagctccaggcccagcctgtcccttctgagctggccttgagtgaccccgctgagccacatcagctggtctcgctcctcagaggtacattttggctctgaggtaaacgcttgggcgtatttgaagttactgagctctcgtgacagccgcattacatatcgccatcggttttctgacttaggattcttcttaaagtctcctctaatcaggccattcaccaaagcctgccccgtgagataaccgttgcgctgaactcagtttagccagcctgggttctagatccaaggagattgttccctctgatatccccagcttgattatcatatacttcccggggattaagtcaaacctgaagggcctcagataccagaagggattccttccttccttctttcagatgtgtagtgggtgttgcccgtgtgttagcggtcgggtctggtactggggctataacggtaaacagaaccatggccatggggttcactgtgtctcctggaggaggaggatcaagggtgagaccggcagacagctgatgaattaattaccattgcatgtgtgtggtggtgagagtgggcaggtaagccttagaaagcctctctgatgtgttggcctcactcctgggacagagtagcccgagttaggaaagagacttccctcgaagggctaagttacctgctgtacccgtgtgtactcagtgactgggttacgacccgtccgtcgtgctttccatcgcgcatctgagaccttgtgtggtccttcagatgaatgtagatcatctgggactcggaatgaaagagtagtgatgcccacgacgagaaggcacctccccttctcttccgaagtagtccagataaggatagaggcaccaggcttcaacccttgcaggcagtgggatcccagcagtgtttagctgggttgctgccccccccaccccagccgccgtgtgctttcctacctacagaaggaggcagaaacaagggaggattcactaccagggccgtgtagctttaccttgaacattgtcacaggcttgggattcttctcacaagctcctgcgtttctaccacccggctgagcatgctctgttggagtgagtgttgctttccaagctggtggtgtctccaggcatttatggaaggacaggaactggttaagtttatcagtagcattatggagtttgtaactttttatctaaacaccacgtttgcagttatggcgaccctcagcaagatgccgccagatcctggtgtttgggagctgggtgggacccacacatcatattctttttctctgtgaaaacggaggcctgggagattaagtcagcttgctcatcatcacatagcttgttgatgtaatttattgctgagactggaatcctagcctaccagctcttgatttagggtctttcctgcctcacagtttttttggctccccactgggtctgaaatggaattgtattattctgtggtgttaatagccagaggaggcttttaaacatttgcactaatatagtttttttttttatgtttaagagtaaaaacttcaagattttttagtatagtggtttgagattgtcttaaagtattttatttttattaacgctaattttaatcatctacctgggagtcgtgataatccagggctgcatcttatcagaggcttcccccagcttctgcaaggctgatgtaaggcgaggcagaagacttttatgagtatttatgggcctgatgaaataatgcatctgctggcagctaattgccactctttctaggaacggcaagccatgtgacagggcctgtcccagcagggatggctccatttcactctcaaatgcatttaatactttttggggttttttttgagaaagtctgactgtgtcttttttcctccctcccatggccacagggactttgggctgcatcagtcacccgatcgccttcaggtccttaaccgtggccgtgtgctgggattccccgggggactgagaggctgctgatgtcctggtgttgttcctaaccagaccaatccatcacagagtttctgggagtgtcctctaggcagtgacattagacacacgcccactgatttgagtacaaacaatcccgggcacgcatggcttaccggggcattctaaatcgtagcagggagagaaccttgcgatcgggcaggtggttcggtgacggctccttgcgtgccatcgctccacaaatgtgggcggcccagaactacacacggccggatgaactgcttgtgttttcagtggggggagacgcagtaaggtggtagaacacggacacacagaaagacattacttcacaggtgttgttaatccttgaatttcttgaacactttctgaaggattttccagagtaccagaccccagagcaagtgcgactccggtacggactttagaatgttgggcgcatacaggcgaaatgcacgccgagacggagttggagagagtttgcattagctggagaagttgaatttaggccctggtggtggtagcgcacgcctttaatctcagcactccagagacagaggcaggtggatctcttgagtttgaggccagcctggcctaaggagtaagttccagggcaacaggtgtgtgtgtgtgtgtgtgtgtgtgtcagcaggggtggagcagaaggagttgaattcagggtatatatatatatatatatattccctgaacatggcttctgggtggaagagagaggacctaggcaggtagctctggctcatcctgctcacctctcaggtagcaggctgggtgcctctgatttttttttgtccttaaaaatgagtgtggggcctggagagattgtgcagggctcaagggtctttgctgcttttccagaaggcctgggtttgttcctagcacccaatgtatggtggctcacaacccctagtaactccagcttccgggggacctggcgcatgcgcgtgcgtgtgtgcgtgtgtgtgtgtgtgtgtgtgtgtgtgtgtgtatgtatgtatgtactggagagacacaaagatcccgagttaaagatcatcttcagcagcctagggaggtgtaggcctgagccctgtagaaccctttattatatagatgaggcacagtgaacatagggctgtttaataactcccttaaggtcactcaggtgcatggagccaaattattaacttcagtgctttgactttacagcctgctaacatctaccccatgaaagcaccttatcaaaatagacttttcccttcgcctaattaggatagctcaggtgtgttccagtgctccgtccccactcattctcccttgctcctgtcagacacaagcccaggggctcttggaaagtccttctctttcctgttgtctcaggagtcacttactccctgtgtctcccctttcctggtctcctttgatcctttgcagaggaggtgggatctgaagcagggccctgcgtttctctcctctcaggtcctctgaagcagggccctgcatttctctcctctcaggtcctctgttatcttgagagtcctaaagactaaagctttggtctacagagtgagttccaggacagccaaggctatatacagagaaaccctgtttcaggggaaaaaaaaaaaaaagactaaagcttggtcgtgtttggggacatcgtggtagctctgctgatgctgcagtcaggtcccactttgcagctcataaatcatgctctctacagctggtgggtaccaggaacaagttctgctggtgtagctccaggctgcctatcaaggtagcactccggcttgggagggagggggggaggctcagacacgaaggctgtggttgcagccagctgcaggaatgtttgctctacctaaatgtaataggcagctgtgtttacacgggtccttcagtttggccagtaaggagcatagatgtatatgattcttgggagggtttacccaccctgctcccccttttaaaatgtgattttttttttccaaatagtcaacctgaatttaaaaggcagtatgacttctggatgttttgggtcaggttttagacgtaggctttatttttgctaatgatatgaaagatttgcccctttgtaggaagcgccaggctgagagttcctggaagtgttcaagttctatttatattcggcaccatggcagagatggtggcgacacggttaccaaaataacaccgtggagatgtctgaagtggttgagaggacacaggggtaaacacacccagggcctctcagtcagccctcaacaaggacagcggctgtgactagatagatgcgtgggatcttttccccacccaggaagcaacagcattgctgtagcggacaccacctgggtgtctgttggttctcctcaagtctgacagcgtcatcctgaagctagcatgtgaccccacagctgaggccccagtttctcataccacctcccagttccaaggccagtcacaagtgtctgtcctttagtttcaaggtggattccctatggcgtttttcctcttgttcaattaatttttaaaagctacttaccaaaccaagagaagcacatttaccagtttattataaagcatgtttatgaaggatactgataagagatacacagggcaagggatagaaggagagtctttcccacgtagaccacatcccggaacctccagctgtaaccttgggctgtctggaagccctctaagccctgcccttggagtttttaatagcttcatcacattggcacacctgatgaaataaccagacaacttaaacttcaggtgctctcttctctccagagggacaagatgtgaacactcactgtcccagcacttgggagacagagacaggaggatcagaagttgagtctcaactccccaccctgtcttggattctgaacgactgtgcccatcccaaaaattatcgagactgttggtcactggtctgttgtggatagccctggggctaataaaatttgatgttaattctgtgagaggttttggatgaggaatgagtcagcactcaggtgatttcctgtaaacctgcttcccaccttaatttgtaaaataaaggcgagctgatgattgggcagctaagggaaggtgaatagaagatgaagagggaacgcagagagggaaagaagaagaagaagaagaagaagaagaagaagaagagcggagcagaagcacatggcctggagaaaccgaaagtcctaaggggtctcatggatgtggaagatggtagtgtagcggtagatctgcccagtctaggtgcacagcatgtattcatattaactgagttgtgttttcattgctgggcatatctgagttggagatttgctgtaacacggatcagcttagtagcaagtaaaaagacatggcttctttgaagaccaccaggatgtggaaagtgtatgtcaggcaacaggacaagaaccagacgttacttattttgtgatatcttagtggcaaataaggcctgtggtcgtgaagcctgcgtgtaagtccttaagagcaggtcacagtactatcatgggtggatggggcatgcctgccaggacttgtcctgctgccgtagctgtagaggatcttagaggcctccattttagagacgggaaggtatgttaacttggtttcttgttgcaatgacaaaataccttgaccaaagcaactgaagggagaaaaggctgttttgggctttgagttccaaaggggacactgtccatcctggcaggaaatgctcggtgataggacgaagaggctggcctgccccattgtaccagcagtccagaagagccagagagcaggagctagggacaggttatgcagcttcaaagccagcccccagtgactctccaccagggccattcaaagttctctttctatccagtgccagtagctgaggcatcacgaattcagataccagccggagcccatggtggacatttctcatccagaccacagcaataggactgttcccaaacctataaaatgcatcagatgggttctttggttcaagcagtaggactttgtactaagataaacaaaagtagcatattgcataaattcacacctttgaaaaaactggctaacatggaaggactatttaacagggggccagataaggcagtgagtgagtctaaggtacgggatggtgtatcccggaagtcctccattggacctgcttcgggatgcacattgtaggccaagcctgggtcctaagtgctgctgttaggtgtgggaatcacccggagtggtgaaggtcatctgaaaacttgatggctctcgggaagtcttctggagtctccagttcctcttctctgcttccccacagccctttatccctctgtggtcttggctccccccccccccttttttttctcgagacagggtttcttgtcgccctggttgtcctggaactcactttgtagaccaggctggcctcgaactcagaaatccgcttccttctgtctcccagtttctaggattaacggcgtgtgccaccgctgcccggcttggctccccctttctacctggtggcctttccactgcctttcctctctcagctctggccgccctccgcagctgccggagccggcaagcagcccactgcctcgctggctgtctccacatcctctgcctcgcagccttcacagcttgacttgactgctcggctgtgtctgccacttcagttttgctgtctcttttgtgttaacagctcagcagagaaaagaccatttgcacgagaagccttttattaggcttattaccgcagcaccaagggaggcagcagaagagagtgtctctcagtccactcacggagcctgctcagacagccagaagaggcgttcgggccaatcactctcttgcccctcaacacctgtcatggttaccgaggcttgtgcttgtaccaatcacagtcttgccccttagcaccagtccattctcttggattttatgccaatggtggcattgtcttagataaataaatcacagccgcccctctgctagacccctgggggagcgctgcctttctacccgtgctggaaactgttctagggttacagagttcatagaggctacgacaacaaagccctccgggagctggagtaggctcatcctttgcacagttgtcacaaggcgaccaggggacttgggaaatttattgtgaagaattctttttaagaaaatgtattgttttgtcttagtcaaggtttctattcctgcacaaacatcatgaccaagaagcaagttggggaggaaagggtttactcagcttacacttccaccctgctgttcatcaccaaaggaagtcaggactggaactcaagcaggtcaggaagcaggagctgatgcagaggccatggagggatgttccttactggcttgcttcccctggcttgctcagcctgctttcttatggaacccaagactaccagcccagggatggcaccgcccacagtgggccctgccccctctatcaagaaaatgccttacagctggatctcatggaggcacttccccaactgaagctcctttctctgtgataactccagcctgtgtcaagttgacacacaacaccagccagtacatgcttcaaagtttcatgcatatgcatatatactgtgtatacaaacacacatatatgtgtttatgtgtatatgtatctatatctctctcttcatgtatatcttaatcatacataccggtccctcagtccctccttcaaactcgtcctcttccctacaaattcatgtcctcttttaaattaaaaaccaaaagtttaaaaagtgttgagtctttacagaggggcatggctgggcagcctgccagtggccaccgctcagaacagtgaagaatctttagctagtagaaagttacttctgatcagcttctaaaggactgacggtgacttccaggaaacacaagaatcacattagaagaacctctttctttctttctttctttctttctttctttctttctttctttctttctttctttttctttcttttctttctttttctttttctggagcagaaggagagtacaagacacaatccacaacctcttaagagtttgtaagaagctctctcccctcccccaccccattcctttcaaggcctagagtcaggcccctctggagatgaagtggcttcctgacagggtatgtggatggaccagaaagctgtccaagatagaggggcaaagaggctgcttggaaagtaacaggatatctcagggggtcaaaacatcccaaactcaggaaaagcccctccccgcccccacgccagtgtcttttcctcctcctccctgccctgtaaggcggaactagctttgcatacagaacagcgatgtcaccgggattcagctcaggatgcagagcagagaaggcagagagccgagaagtgataggcaattcacagggttccgagaaaacagcttgtgaacacttaccatcgctggctatcctctgaaattacggttgttattttattttcatgtctgtgtaactagactgcagtgttctttaaggcagacatcatcaacaatttttaaaaattcaagcttagaagccatagcgtagcacaaggtgcgtatcagccaccgtgagttcgtgggacgtgcagaagaattactgtaaaacccgagtcgtactttcttagagttcagattgtgactagcgggagtcaggagcagacccgtgcagtagaagagcctggtgatcctccctgtcgctgtgcacgatttaatttgggtcatagtcctaaagggacacagtccatcgtgatggggaaggtggagctgccagaacaagtgggtgctggtccctttacatcagcagtctggaagcagagagaacaagagaacagggagtgggccctggccctaaaatctcatggctcatcctcagtggcattctttctccatcaaggctcttcctcataatgagccggtgctcttcccagtgccttgcgaagatgtggacagtcggccctccctcaccagataccgagtggcagcccttgacctagaatttctagtatccagaactgagaaataagtttccattcatttataagttacccaggctgggctggcaagatggctcagtggttaagagcgccgactgctcttccgaaggtcccgagttcaaatcccagcaaccacatggtggctcacaaccatccataacaaaatctgatgctctcttctggagtatctgaggacagctacagtgtacttacatataataaataaataaataaataaataaacaaacaaacaaaaaaaaagaaatcactgcaaaaaaaaaaaataagttacccaggctgtggtatcttgttatagcattataaatacaagccatcatgttgtgcatagtaattatatataatcttgatttgttagtgtagtacaatttaagagatcagtatggtttgtaataagctagttataaagtataagatgaaaaatttgagctatttttaaataatctcaacattttagcctatatatagggaaagtgtaatagttcttctcagacatcctaggtttatggcccagtctcacattaaaagacaaatgaagaaaatatacaacttaaaataagttatttttggtgtgtgtgttatagtgtgtactgtgcagtacccatgcacacacatatagagaaagctatatagatacatggaagctaacattctccatctcattattctttcaaacgtaatttattatttttttattcctgtgaatgttttgcttgcatttgtgtctgtgtaccatgtgtgttcctggctcccacagagaccaacagggggcgtcagcttccatggaactggagtttcagagagttgtgagctgtcacgtgggtcctgggaattgaacctcagtcccctggaagagcagctagtgatttcaactaccgaaccacctctccaacttccaaacttaatataaggtttatgacatggatgtcgttctaaggaaattcagacccagggaagcagttggacttctgcctgtttatttaggtctgaggaaatgaagacagttgttgagagatagtgtaatccagtggtaggagtgggaactgacagggtctgcacaggtctcctctgtgaccacctcttcagagacaggagccactttttcttccgccataggcaggggtgtctcacaggaggctcttacaatccacttcaaggaaggggcagggagaggtgcggtgagcagcctgcctctgctacacccccagactctggaacggggcacctgaaggcccgtcaccaccacaggaaattcatttctctggtggagaagcactggccgctctcctcactcatttccagaaagtcacaattttcttgctgccaccaatgctggaatccagggtttcttgcaagaagccgaacaaggaagagaagttggattgtgtgcgtgtgaatacattacaatcttttcaatccccgagtcaactggagagagtcttttcaaattattactgcggctggcctgttgctgcttcagttagcagaggctgggggtggggtggtggactcaaatgccctcccctaagtgcctctcaaggaacctgggaggatagtttcactccactgtttaaataatctttttgtttgtttatctttcggtgagtattctatttcaaagtcttttactagattattatataaccgttttttttccccttttgagcgtcttctattcatgtgccttctgacattaagttccaaaatctttcctttgttttcccacaatctgttagattatagatggttctgtttttgccagtgctgtattaaaatattctccagataggccgtctttgtcctgacacttggcttttctctccttgtgcttgctaaggcattcctgacgactctctcacttaactgtagagcgtgtttcaaagagactactaaaagctttggcagaacaaccacatccccccctcctcactgttgcctagccggttccacaccacacaagactataggacacagaaggctctattagcaagtgggaaaaaaaaatcacagcacagccaaatcatcttttttttttcttcagtcagtcagcatttattgaggccatactatgtgccaggagttaagtcagtccggattagtcaagtataagctctaactgcttcatcccagaaggttttccagggctggtgagattacaaacgatctggtctctcatacaaactgagggcttcccatggagcctggtggatcagttgtcctcattggatgttgtcatcatcattagatggggctgaagaactgagctgtgcagattcattcagcagcactggatacacaagagggagatgcctgtgggtggggtgtgcttgtcacttccttttccagagaatttgcctcctaaccccattcagtgtctcacgtctgaggctgatgccattatttcaacttctcatgtgaggaagccgagactctgaccagccaacatagcatctcactctacagatactctgaaacatctcagtggggtcaaagccgggtaaagtctggtttctaccttctctgccgggttgctggttttctctgcctccaaactagagtgcttcatccctctactccagtggccgtcaagacaagtgactgaagtgttaaaacctaaagtgctacattgcgggcagtgttatattttcctcattttctcttatgcatatgaatgtttacctgcatgtatgcccttgttctgttggcatggaggccaggtgttggatccctgacccccagactgtggtctgaaggtgcttgtctgcaggggtcctgttggggactgaatccctaaatctacatgtgagggctttgaagcaggtaggctgagctgaggccagggaaacagggctcccgtgacgtcactgatgatggttttataagaagagagacaaagacttatgctgcctagtttgctacctcataatgtaattaatttttttttttttttttttttttttggctgtcctggaactcactttgtagaccaggctggcctcgaactcagaaatccgcctgcctctgcctcccgagtgctgggattaaagccgtgcgccaccatgcccggcttaattaatatgttttatcacgtcaagaagcagtaagaaggcccacaccagatgtcaaatagatattaggagtatgctcttatgctgcccagattccggagccccagacagagagacaacttttaattccttacagaggatctggtctcatagttagcttaactgtcagcttggtatagcctcgaggcacctgagagatattctccactaaggggttgcccggggcggatttggcccatatgagtatatggggattgtctgttggtgtagaagtccccagtatactgtgttcaccactgttccctggcaggtggtcctgtgctctgcacaaaggctcctaggcaggaacctgtgatggatggagtcagcaagcagtgtttctccacggcctctgcttcaagtccctggtttagttcctgccctgactcctctcacccataggtgtcctggaagtacaagccagatacactgtgtcttccctgaagttgctttttgttgaggtatctgtcacacagggaaagattaaggagtgcacctgatcttttgttaaggctatagaaggcagactaagaaacccattactgtctatagtttttcttacttttagatttccttggaaaactagcagataagtctctgcctgaccttcagtgacaatgactcctaggaactttctagtgctttctgtgtcctgtttgctgaatacaagcagttagctagtcatttcaccagactgaaggcagtttgttctggtcactagccaggtagcatctaacttgtctggtttcgggtgcattttattgttgccgttagtaactattataatagcaaatttcatgtgggagcacacgcccttccttccttccttccttccttccttccttcctttctctctctctctctctctctccctctctctctctctctctctcaatgactggaaattccagtcttgcatgtccccattaaatacaggaatagacctgtgattagaccctttggaacccatctttgtctagggccaaatctttattcaaatgagggaaacttgaagagtgaaagtctgaagccttcaggattggtcccctctgcactgatgttcccaggctcagtgtccaagcagacaaaatgaaagccacctctcccacagagcccagcggctctctaatccagagccatcttttctggctgaacaaaataatattctgtacatagtggcttgaactttggtacaggtttgcgcaagtcagtttttgtcagtttagagtcacctgaggaagaaaggaccccagccaagggcttgtctccctcagactggcctgtgggcatgtctagattagtgattgatgtgggaggtctcagtatactgtgtgtggggccattccagggcacatggtcctgggttctacgagaaagcaggctgagcaagccctggggaacaagccaggaagcagccctcccccatggcctctgctctcactcctgccaccgggttcctgccctgcttgagctcctgccttggcttctgtccatgaacctggtgtagaaatgtaagccaaataaaccctttcccctccccgagacttttggtcgtggtgtttattacagtaacagaaaccagattaagaagatggcgagttccccacacgtcagtgtggtcaacactggctcccaggcacgccacactatttggggggtttggggacctttacgagataaggtaggtagggttggttcctgggagggcatgcatgccttgaagttacttctgctcactttcctgtccaccatgatgcgaccagccttttctgtcccatgctctgtttccatttggcttaatctcacgaagccaactgacttgtgaccgaatcctccaaaccatgagctaaaagaaatcctgtaacctcctgtaagtggttcctatcaagtccttggtccaggtgtgcagaagaaactaatatatttactaaattctgtgcctctgccctggtccacatctctcttctaggttaatctctagcccacctgctgggctggttgttagcttagttctctcttgacccttcgtttggttcatggagatatacagagatggtgggggttcttgctgctgccttctgctctgcaccactctctcagccttccatttggacagtctgcagttttctatctctgcctcttttaggaggcgcacagttttaaaatgaaatcaagtcttcaatagaaagaaacgcttatttagtgcactgtaggaggcagagggccaggtggtaacaaactattgcctgccgcctgatttcttttgtattgttgctgccttgccatggaatatagagtgtagaagttgggaacttgtggcttcagttatcctgtcttgtgtgacctatgacgtaagaatagattgtgtacgtgtacatttatatacaaatgtgtgtgtgtatatatgtatatgtatgtatgtgtatgtatgtatgtgtgtgttgtgttgtgttgtgggtgtttgtgtgttgtgtaagtgtgtatgtgtgtatatgtatatatgtatgtgtatatgtgagtatatatgtgtattgtgtatgtttgtgtgttgtataagtgtatatgtatatatatgtgtgttgtatgtgttgtatatgtgtgtgttgtatatgtgtgtgttatgtatgttgtaagtgtgtatatgtatgtgtgtatatgtatgtgtatatgtgtgtgtgtccatgtatatatgtgtgtgtctgatactttcactctgtggcagaggctggcttcccattcatgatctgcctgtttcagcctcctgagtgctgaggttacagctgtgtacttgtaacctgacttctaagaatggtttatacttccttttttttttttctttcgtgaaggtgcagaggaacaaacccaggctttgcacacgctagccaaaatctctgcgaccgagctgcacctccaagtccaattttaagtggccaaaaagacggaaaacagtttgtcatggcagttcaaacccagcgtgcagaagtaaagttttactggaacatgcaatgctctatttgttaacatgctgtctctggctgccctcacaccacagcagtggagttaagcagctgcaacagagctcttggggccacacaattccaaatgctccagtgagaaaagccaggaagcctgtgactcctctgctggagtctcagtgctgggttagagcaggtgctcagagttaattgtttgggaggaaagcctagagggactttcctgaggtaaacagtccctgtggagcccgtcattatctctgccacttcttttgaactgggtttcgccagaggagatttgtcataccagacccattgagccttttctttcttttctcttgcgtgcagaagaggagagagagcattgggtaacgctaactgatagtgcctttgtgctctgctcactcacacgaggatctggtttcagggtgcacccagtttagtctccaggtcttgaagtactgggctgtgaggtaacattggggtttaagtactaaccacacaaagagttatgcaaggtctgccccatgaagccttgctttttgttcctgtccatcgggtactttatacattcccacccaaccgtccatcttggctttgttctcatctctttggaaggaaaccattaattaccaaatctcaagaagtcctaacaagtgatcctaagcaaagttgagcatctcttctgcaacccgagctggtcattgtgcgggttttgccttttattttgaggtgcacctgagttgggttctctgcttcctatggactggttaacatggacagtgctgtgggctctaaaaggcatcaaaaagatgacatcagaaactgaatggagcgagagcctttctccttcaagaggttgctatgtggaaagaggcctgggaattgtggattagtgtctttcctttcctttttttttttttttttatggtgctggggattgaacccagagtctcacagatgccatagcactgagccacatctctagcccctggatgtaaatttccaaacagcttacagagagggctacaaagaaataacagtgagacaggtgtcacggcttctacctttagccctatgactccagaggcaaaggcagatagaatccctgtgagttcaaggccagcctggtctacatagcaagttctaggtcaggcagagtgagataatgagactctgtctgggagagaaaacaaaacaagaggcaaaggaaaacaaagcgctagtgagttctacacacagtacacacacacacacacacacacacacacacacacacacgcacacacacacacacatacacacacagagtctgttgtccccaggctcctgttcatggactttgccgtctttacgacatgacttctgttctcatggtcctatgttgcctctggagtcattctagaagagagaggagacaagagagaagacagcagaaagggggagtgatactccctgtaccccaaggagagcagctgtttaatcaaaccccagtgccttggtcttttgggaatggtaaccacactttctagtggctttgaaggccctagcttcccgtgttgatgatccagttccccagtcgagcccagcagggctgttttggaagagagacatttatcagctttttctttctgatgtaacaacaccatgtcttttcacgtgcagttactacctccctccctccctccctccctccctccctccctccctccctccttttctcccttcctcttctcttttcctcttcctttctctctctttcccattctctctttcttctttccttcctctcctcattcttctcactcttcttcttctcttccaacactcctatttcttcatctccacttattcccttcacattctttctcttttcccttatcctcctctcattttctcttccccctctttcttttcccttttaccctcttacccttctttcttacctcctctcttcttctctttcccctccttcctttctttcccttttttccttattcttatctaccctccctcctttccttttttttccctccttcccattctctctctcccttttatgctcctcccttcaccctttccctttcttcccttttttcccttttctcctctcttcttttcctttttcccgccccctttcctttcctaccttttccctcccccttcctttcttttcttttccccctcttcccctttttcttccttccggcctcttctatctttagccgctctcttttttttttgccacctctcttctttcttttttcatctctttctccctttccttttaccttctcctttatctttttccattctgttctaccttctcctatatcttttacctttttcttttttatctgtcctcccctctccttctctgtctcctccccctttctaccccctcccctctttcttgctgttctccttcttccattttctctcccctttcttctcgttcttcctcgctgttattctcttctattctcttcccttcttctctcttttccctttctgtcccttctttgtctttgttcccctttcctcccttctctcannnnnnnnnnnnnnnnnnnnccttttctgtttccttttccttttctctttatttccagtctctgtctctcaaaaacaaacaaacaaaaatcaaccaaagaaacaaaatgaaacaaaatccccaaactccaacaacaacaacaacaacaacaagaagcaccttcattttcaggtcccaatataatcttttctcaaagccttttaatattctattgaatttggagtgggttttccctcccttgattctccctagatttttgtagtactattttaaccatcttttgtcatagttacctgtaatcgtctgtaacccccctaataactcctcaccatcggttgccaggccctctgcggaagtcacagccgtcacagaaccgtgtatgggaacttaaacttgaagaagttttatgactcacagtctgagggagggaacatggtcaacaatggcgggaaaggcaagccacagaaatggctcacggcagtagtatcagagagtctcatggggcttagattgaccaccagtagtcagtaagtagaagacactggtccagactggtccagaaaaggttcatgatacaacccccagaacttcacttcctctagtgaaattccacctaaataaaggtcttacaatttccccaaatgccaacactaactgggaaccacatgatcagacacatgagtcagtagggagatttttttacatggactctgtagggctagggtgagggctgaagttaaggactctggcttagactgtgagggcagcatcacccccaattcccatctttgtcagccgccccacatctactggattgcttcagatctagggtggcatggagacttctgttttgttccccaccttaacagagaaaggacaagcaaagtgtgggttctaggctgctgctgctgggcctggcactgatcgacaggctctggaaactgcaggttctgtatcccaggctgtgagcgcttggctcaagttccgcagtgctctttgtagaggtttcctgcgaagagtgcttgcaaccacagagccatctccctcactccactccccctgttcttctttgactcttctggctagtcttctgggaattgggtttcatagagcagtgctcaccaggtctctccaccctcgcctgctcccccgggctttctgttgcctcccttgctagtggaaacagctctctaagtaagcgcacctttctgacctgtggtgaccttccaagggggcacagccgcctgctttttagtaccatctgctctgcagactgttgagagcagcggtcctcattccattacacagagcccaccttttgtgacagtcacgctctgatccatttcacaagtggcttaagtcatttatgtcgtttttgttttactcactcagggatcgagagggtagacctctttcttcatcatcctgaaccgcatttcacacctcagactgactctcagaaccagccaaatacaggacttggctctcagatggctgtctgtatgctgtgatcttgagggtgggagagacagggtctagccaaagatggggattaccttcaaaaagggccagaaggctgtttctcatttgttcattaaagaaaacaggtgccaagtaggttccctttttacaaatgcttcttgtagagatcatttgaataaaacttgcggtgtaatagaagtagttgctctaggctccagttttgactgatttctgttggttctgcaggtctgtgtgggccacacaggggtttcggggagcggtaactatccacggcagggtgtcttgatgctggtggtgctttgttgtttttagagttgcttttatttccagtatatgagtgttttccctgacgttatgtatgcgcaccacgtgtctgccccgtgcccgaggaatttagaagagggtgtcacatctcctggacctggagtgagggacggttatgggccaccatctgagtgctgggaacagagcccaggtcccctgagagagcaacaagtgcttgcaaccactgagccatctctccgcgccccctgttgttactcttaagtgattaagacaggaagcagtaatgcagagttcccagtactctgctcagcttcccaagggtaacaccatcagtgaccacggtgcattgttcactaagctggaaactgatttggtgcagcatggcaagagatgtcactaggatccagtgtacgtatatgtgtgtgtgtgtgcatctctgtgtgtcattctgtgcaccttcatctttcaagtccccttgatttgtaacatggtcgtttgtcatgaaattagttggaattgctcatgtgaataaggagaccacactggaagtgacgtcactggaagggaagtcttgctttaacgttttttttttttttttttttttttttttttagtgaaggtttctggatcaggaagtagagagtcaggttctaattccatttctctagccatccagctgtgctgtttcgatcacatcacaaacatgctcagagcatccctccctcatctctgaatggaggcgctaagccaagcaagactcttgattccccttttcccttccctaaatccctcatagctgctgcttttcagcagagcatgccctgccagtcactgaattgttgtcgccccaaacctcagatggacacatcccgtcttcttccattgctacacctgtcctcagtagcagtgcctgctgccccagggagccctctctgtcctcagtggcagtctccactgtcccggggagccttctctgtcctcagtggcagtgcccactgccccagggagccctctctgtcctaagtggcgtgtctatgcccccagggatccttctgaagtctgccctgtctcattactcatctgggttcgtggaataggttgcatatgtgctttctaccaacaattgtctacatagcaagcagaatttacaaagcagatccacttcggtggcccctcgtgacactggaggaacagttcgccccagctcctgctgctaatctgagtgtcagctatcagtttcccttcctctgcctggccaccagccacgtaggctccgtgctgttccagttgccgagtctgtgcctccctgtggtcttgcctacctgcttgctcacactatctcatgttctcctctgctaattagccccatcttgtatcttgctgcgacacctctccagtgaggctactgtatcagctccctcccccaagtcactttcccttatgccacctcaggctgctgctgctgccacagcgtgtaataccatatgacttggctatccttggctgtgactagactggcgagctaaccctccccagactgcaggctccccagaaaggtttgcctcagctgcctggttcatgctgcattaggataattccctggccaaagaagccatcaataattgttgaacatgtgcagtaatggaccagatagtcataatagttcttgaaattgaaaaagtaattaaattaaataattttatggtaaaatgattaattttttggtatgttttggattcttctgggaacattcttaacagattcctatatagatttcttttatgtgtgtgtattgacaaagggtcttttctgaggcagaaccttttgaggtgatgacgataaggtttctgtgccctgataagaaccaagggccttgaacatgctaggcaaacacataccatcaccgaggcagctaacacaccatactgagccgcatccgagcctcagctaacacaccatactgagccacatcccagcctcagctgtggttttgctttagaaaaatcagggtttgactttcttggcctttcggaagcgcaggaaactcaggatcatgtggtttgacattgagccagatgtgcttttgctgtcagcctgaatgccttcctttccttttgaatttaagatgtcaataagggctcgagctgggagctgctgattctctcgtataaaccgaaagacgaggtttacgtccttgcctctcttcttaaattcttgtttaattcccatttattgatggtcagaaccacacagtgaaactgccactgtaaacaggctcccagacctcagcacagctgactctatgatagaagtaccatttaggccttgaaactcagtgcatagaagacagcaccatcagccaaagtgaaaacaaagacctaatccatcaaagtccacagttctgggaaagtctctaaatgcactaacctggctttttggctcctgtagttcctcttctggctaactgttattgttaactgaagtatgtcaacctagcatatgttttttgtgcttataatcttgccctgagaaaggcttggggctttgtgggatcccaaacacccaatgtagtcgccagccggctaataaagacttcctattggctcaaatccatgtctgagtcgtcttctctggtgatgccctgcagtatcccttgcttgctgcctgttttggaagtgtgatgggagatggaatatgcatccctgcgtccagcgtggttttatggggaggaaatacttcacatttcattaaccatcctcatcaaagggtaattttcttttctctcaattcgggaagatttatttatttacccttttaaaaatgcaatagaaagcaacctccagcggcccaagtgttgacattctggcttcttttgttatgttttttttgttattgctgctaatgaaataattttcaatcaagcacaagtgcactttacaaaattataaagtggcattttcttttaaaagcatcgtactatttttttcattgttatgctattagcttctagggtgttttcttgagttctttccttttgttgatttttaaagagtcatgtgtcaatctgagtgtgagtccagttatgaaatgggagtgacagaaagaatgagatacacttcaagatcccttcctggcctcttgatcttgctttcttgttcatgttctttctctacaccaggggtggactctagcctgccaacctcttgccttcatctcccaattgctggcatatactaccatatatgccccagctcaaaatagtaatttccgtgaatttttgtttgtttgttttgagacaagatctcatgtagctcaaactccccatataggatgactgtaaattcctgatccacctgtctttgatcccaagtgctgcgattataagtgtgcactgtgcctagcttaaaatcatccattcccttcctcaggtccaaccttatcttctctatggttttgtggagagataaatctaacttgaagaaggtgacttgggagaagggcaaaggatgaaagggctgtttttcccaaagcttctcattggcagagctgaaaatggctgctgtggccgtgtgtgtgtgtgtgtgtgtgtgtgtgtgtgtgtgtgtgtgtgtgtgtgtgaaaccaacaggtaaaagaggctcaccttttaagggccttttggctccaagatagagctgctttgtatacaccaaaggatgctgtaaaggaaaggaccgtttgcaatcaagtgttttcctattcttgtagcatctgaggataattttagaactccccactgttaaatgcaatcattatttaggagttagaatatttataagtatgatgtgattgcacatttcatttctgtgttaggtcttacctgtgccttttaagtagtatagtaaattattttcttgtctgtggatggactgagaaagagtgtacatatagtttgcccagtcgctgaattttatgacacgtccaattcacattgatgttgtagttttgccttgggtacatttcaggtgacttttgttgacctgaaatcctgtcagaatgattgactcagagaactcctgggtcacgtaaccagagtgtttcatgtcctgtgagttaaatctgtgtggaaccatcactggatattagacctgactgaatctgccatttttatgaatgatcaggaggaggcacttttgcggattacagccagtagcaatgtggcatggtgaatatttctgctcccttgtcttgtttcagtatactgggcagcactttgtcccccaatttggttattaaagccactattaaatatagctcctatgtcacagattagaaattcaggagaagttagcacacgtcactgtgtattagttgaagcaacaggcctgaaagatgcacttctaagatggcttctttctcagtgcctgcaatagctgacagctggggtcctcctggctgggcgcttgcctgggtctctatcaatgctacacttcctcacagcgtggaaactgacttcctcagaagttgagggaagaatttcagggtcccaggtttctttgaaagtactaccaggcatagtgtgcaagcatcacctctgtacaaccctcagaacacgagtcctctggcatgttatggtcaaggatgtcactaagatcagccaaggttcagggccaagtgagggcagagatggaggtatctccatctttcaaaggagaacaaagaaaggatttcaggccaccatcaaccccatcagaaaagtatttaccaagtaacaatttataagtacccccacccctgctcctgaagcacagcaggctaatggtgtggtgatccagtggccagtctgtgtaccaggacccttccaagtgctggagtgctcactcacacaaaaataatctgctgcagcacatccttgtcacatgatgaagagcctgactaatgtcaacatatctagaaagctgtcagtcttctctgagtcctggtaccaactagtttgtcatgagagaacaaaccatatatcctccagctggaaggggcactaagagatcacaccgtcacaatgatcaccttccagaaagatttattgagtatcttttaggtgccagaccccgtgtacacagagaagaacgtgccagactctcgcccttgagacagggttgcagaaatagaggaaatgtataagagatgactaggaggccaggggatttcagctgacgggcaaacgccagagtgaggggtcttcatggatgccggtatcacacaatcatgaatgacagcagggagaggcagttagcaggtggttgtttatctcattgaaaataaattccaaagggctagtcattgcctacaagttcctctgaaatatgattccttgactcccctctaatcccgttgcttcctgacttaaatccggtgttgctataacaaaatactttaggtcagatactttataaagccagaagggtctgcttagcttatggttctgtaggcataggcggaccgtactgggaccttatcagctttgatgagggccccatgacttatgtcaggagtgcatgcgacagattgggattcaccttctaaaaagagttactgagggatttcttgtaacaacgcatccttgtgagaactcttccggtcttataagacttgtgtcattcttttcaagggctcttctcccagggcctttctgcctacccatagccttggattttagagattccacactccagtagtttctcactggagaccaggtttctggtacactaacatggcgggggttgaggcaggtcataaccaagtcgcagccaagtgtctcaggcctgatggccttagtccaaggcttgtggtggatggaaagagtcgactccacaagttgttcctttctctccgcatgacatgctcagaccctcaaacaaacgaagtaaataaataaatgaatacttaatatttaaaagtattggttaaccgtgtggcagaaccttaaaatggtagaaaagaaaaccataaaccggatagtttgccaacagtggcttatttatcaccattctagaagccaggaagtccttgcataccagactggacatctggtgcaggccatgccctgttcataggtggcacttactggcctgtggagactcttgcatgtctacgcatgttacacatacacaaacacacacacacaccaccaccaccaacaataacaacagcaaataataatataatacaaatctttaaaagaaaggtacacacagagggccaagagtcagaggagcaaggttgttgtcgtggtgatcacataatgctgacagacagtggagggaagctggaagtgtgcagtttcaccatctgtgtcaggactagcttctttgattccatgcttgtctctgtattccgtctctcacatagcagccagcgggacctttaagaaacaccgccacggaggactacgatagtgagtatggaccatgctgttgtctgtgggccgtgctgccagtgagggcaatgtctgggtctatgatcctgctatagccaggagctgtgatggtgtctatggcccgtgttaatcctgaaggccatgtggatgcccatggtcggtgcagctacctgcagccatgttgttatccacaggccatgctgctactggacgttgtgatcatgtctgtggtctgcactaccacgtggaagtccacgatctgtgttcccgctgattgtaaagggcacaggttaccaatgactgcaaattcacagttgagaaagactgacatagaaggcttctaggacagctcccctcccccagtaacagcctaaacaggaagccatgaagagaactcttcaatgtgagataaggatgctgaagtgtagcttttaagaattgatggcttctggtgggggtgccggtagaaaagaacttagatatttttaaggggctagctactggaagtttgaccatgctccatactccagagagcatatggcaatacaagttggacttgtttgtatttatttatttacttactgatttactttgtttgtttgtttgtttgttttgtggggagggtcacaaggagagagttggacctgggaagactgggaagtgagtgtgattggggttcataatgtgaaattccccaataatcaacagaagtattatgtatataaaaccacgtaggtcgggctgtactattctcctgtccaaaatacaacaacgggtttttgctgtgtttgcaataaacacaggctctccattatgttagcatccacactgcctccagcgtctccttctactctttctcctctctgtgatggagccaccttcttctcctttctgttcctggagcttgccaggttcacctcaccagcctccctgcatctccaggcccttgcactgcagttcgctccctggaccactctggacctgcaactctgtgcagctgcctcttcctccaggcctcgggccagataaccacagcaggatgactgtctccgcctcactccaccacccatctacttctgtggagttactgacggttgggaggtaccttgtaggtgctggaggcagaacccaggtcctctgcaggactagccagtgtgttgtaattgccactgcgcctctccagcccctcttgttcttatcaacgaagccctcagttttctcttacgtaaggcattggcggtacacggtcagacttgttaccagaggatacattaggtgccgttaaaaaagaacagctggaacctggtgtgctctccatggtaactttgtcaagatgtcactttttgctacccaatgtcccttgattatatccactttattgtccctcatttgtaagtgaagtgtctgctttttgaaagtccttttcattctgcctgtaccgccagcatattgtcatatccagcgcaccctgaaaaccttgtagaatcaggaactgaaactcagcggtcacagtggataggccagagacccgtgaaggctgaggctgggaaagctggctggactgtatgagagggttgacttgagtgcactgggtttgggattttaagtgagtgttctgtcccaggacactgaaagaatttggggtaatttactgttaatttctcttatgagattttgaaatgtagcaaacaggattatgtggacagacaagttcaagtctggctttttgagagtgaagaatatgagttttaaatttaggtggctaatcccaacatttgggagggtgaggcaggaggattgcaagctatgtagtgacctattttttgttgttgttgttcactaaaatgaagccaaaccaatagtcctgcattgtgatttttctgtgtatgtagtttagagtgtctttttaaaacagttgtttgtggccagaagtggggccagactgtaataccagcattgcaaaagatgggagggttgctgtgagcctgatcaatggagtgagcctgtatcaaaaaaaaaaaaaaaaaaaaaaaaggagggtgagagaagggtgaggggaaggaggaggaagaggaataggaggaggaagaggagaaaagaagaagaagaagaagaagaagaagaggaggaggaggaggaggaggaggaggaggaggaagaagaggaggaagaagaagaggaggaagaagaagaagaggaggaggagcagcttaagataactaaatgttgtttaggggaaagtgtgacaccccaagagaaaggagctctggagaattcaattggaaatgttccagtcatcactgatttttttgtagcagaatcaggatgaactccaggcttctacaaagcatcagttgctcgtaaccactgagccagctctctaacccattgcttatttacctgtcgttgctgttgtttgttgtgtgtttgagacaggagctcactttatatccctggcaggcccgaaactctgggacttttatgcagatcaagttctgaggaagtctagaactttggactttttgtgtggaccatccattgagtcagtggctcaaacacacagagctctgtctgccacccacgagtcttaactgaactgcagaatgttgcctggtccagttttattaactttaaaatgagaaaatggggcgggagccattcatgcttttgctccctacgtcaattcctcacactgtgtgtgtgtatgtgtgttccttgcttcagccttttacctttctagcttatcagcaaagatgagcatattggttttattttcagctatctgaaaatgtcatgatcataacagttattatctgtcatgagagcaacttcgcgagaatgttgctaaacaaacacaaatgttatcagttgtcagcagacatttgttgcagaggagaccatatgtgacaagatgtgtggggggaaaaagtaaaaggatcagccgttatcacataagaggcgagaatcgagtgaagtttagtcttaggaattcttgttatcaaagaacctttatcgaggatagccagcacctcaagatgcaggcaatggaagctcaggaaaactaacacacacagagatcttctgactttgcctgtgggagctctgtcgcagtaatggattcttgcagccctgtgggcatttcttggatccttcatttgctttggtctatggtaaagaggtaatttcactaagagacaactgtctacattagctcattaaaaggtctgtacccgatcaagagcctggatttgcaaatgaaatacacacacacacacaccagttgatttttatgtcttgactagctcaatggctggacacttctaaacttctgcccttcagtattcctggcttaacaccttcctggctcaaatgttttatctttgctgtcctcttaccttctcgaccccccccccccacacacacacatacaccacacacacatagttctgctttccctttctacctacattgttggatggtttcttggtttctcttctgcagctcttcagtctcatccctctgcctctgagtcatgacgattctcctcctcctcctctctcccgtggtcccttggtcccttgccagatcagtctaaaagttctgtctctgtctccctgactagccatgggatgtatggcaattctttagtatcaattgaagccagcctggggcaggtctggaagggcagctttaagacacagtattagaataaattcccaacacagcacactcagcacagcacaatgcagcattggggaatcaaatccagggcttcatgcatgctatgcacggatcctatcagctgagcggcgtcctcggttctagccgtgaatcttgcttttctgtttccgtggttttatctttgcagaacgcagcatcattgggatcatgtggtaggcagccctttagatgccttcttccatgtagcaatggtcatttactgtgcctcctttcctcttttcatgagcgactagattcttttgggtgctgagtaatattccgttctctggctaggctgtgtttacttatccatggacttatggagggatatcttggttgttttcagatttcagcagttttaaatagagcttctgtaagcactcatggcatgctttcttgcgtgatatacaacttcagtatagtaagtggatgaataccaagaagtgctcgtggtggcgcacacctttaatcccagtactcaggaggccagaggcaggcgtatttctgagttcaaggccagcctggtctacaaagtgagttccaggacagccagggctatacagagaaaccctgtctcaaaacaaaaaaagtttcattttgtaaggaactgtcacactgtcttctaaagtggctttgcagatttgcgttcccatctgcagtgaataagggctctcgttgctctgagttcttgccagaagttggcgttgtcaggatttgggtttggccagtgtgataggtacagagtgggatctcactgtgatttaatctgcagctccctcgtgatttaaaatgcttgtcacatttcacctgcccacctgccatctgtgtattttctttaatgatctctctctctctctctctctctctctctctctctctctctctctctctctctctctctctctctctctctctctctatcactcatcaacagagacacaacaaagaggcacaacaaagaagacagaaaagaaatacgcagaacagcgcaacgaaacaaaagacaagcacaaagaacacacaacgaaacgagagaacgaagaaagaagaagaaaaaaaagaaaagaaaaagaagaagaagagagagagaagaaaagacaaacagaagaaaaaaaaacgaacaccagaggacgaaaagaaaagaaggaacgaaaaatgccaaacaaaaaggagaacgagacaagaagacaagacaacacaacagacaaaaaaaaacaaacaaaaaaaaaaaaaaaaaaagagaacaaagaacagcaacgcaagccccaactaaaaaaaaaaaaaacaacaaaaatacaacaacagaaaaacgaaacaacaaaagnnnnnnnnnnnnnnnnnnnngcgagattaatctgcagctccctcgtgatataaaaagcttgtcacatttcacctgcccacctgccatctgtgtatattctataatgatctctctctctctctctctctctctcggggtctctctctctctctctctctctctctccccctccctccctccctccctccctccctctctccctccctccctccctcccccactctctcactacctcctttcccccctccctctccttctcccccacccccccatcattgctgagttctttgtatactttgaataacagtctttggtcaggtatgtctttcacaaatatttcctttatcctctggcttctctcctgttctcttgaaatttttactgcagaggagagttttcttttatgggtccccgtcagatgtacccccaaatcatcaccatacctacggccacctagattatctctccttttatgtatcatttctcacgagacgaggaactgaatctagggcctcacacgcactagtcaagtgcctcaccactgagagacgtcctagctttcttccatactctctcaacctccctcctcccacattttgacaggtcttgctgtgcatcccaggctgacctctaacctgcagtcctccttcctctgtcttccaagtctgggatcacaggcatgcactgccttactcggacagagtcttatagtttcctgcttcacaccgagatttgtaatggcggtgtctagattctgtttgttctttagcatgtccagttcttccagcaccattggttgagaggcgcatggtactgccagaagaggtcgctggatgccctgtggctggagttccaggtggtttttaccctatgtgggttctgggaactaggttctgtgcaggagccgccagagcttatgagccacctccccagcatccctttctggttgttgtttggttcttttaggcaagacctagctgcgtggcccgagttggtctgactcatgttcttcctgcctcagccttagtgccaagttacacacgtgcagcagcatggcaggctcatcgtctcgctttgagacaaggtcgtgccattcgttcgggcttggctaggctggatctcaccatgtagaacatgctggcctcagactcagagagattcgattgcttctgtcccaggtgctgggatgcaaaggtgttcaccccgccactacatctggctcagttatactgttaaaccaaagtcttactttattttatgtgtatggatgcttttgctacatttctatctgtgtacttaacacagaggccagaaggggtgggagtcagatccctggaagttgttgctgagtgctgcgagctatcacatagatgctgggaatagaagcccaaggattttctataagaacagcttttatctgctaagccatttctccagccccttaaaacaaacaaataaacaaacaaacaaaccacaacagtaacaaaaaccccaactgtgtgtctttgtcttaggtttttttttttaatttattttttactttccatgcatgcgcattggagtgtgagggtgtcagattccctggagctggagttgcagacagtgtgagccgccatgtggttgctaggaattggactcaggacctctagaagagcagccagtgctcttaactgctgaactatctctcctgttttagattttataggctatttttacaactacccgagtgcactctcaaataactctatatggatctatgggcagtacagtgtctaattcctttgccttacctcttgtatcattgccaccattcacttgatgcacatataagcatatacagctgtcgtacagaagcatatataactatcacacagcagcatatacaactgtcatacagaagcatatacagctgccacacaggagcatatataactatcacacagaagcatatacaactgtcatacagaagcatattcaactgtcatacagaagcatatacagctgccacacagaagcatattcaactgtcatacagaagaatatataactgtcacacaggagcatatacagctgtcacacagaagcatatacaactgtcatacagaagcatattcaactgtcatacagaagcatattcaactgtcatacagaagcatattcaactgtcatacagaagcgtatacagctgtcacacagaagcatatataactgtcatacagcagcatatacaactgtcacatgcagcatatacaactgccacacagcagcatatacaactgtcacacagcagcatatacaactgtcacacaggagcatatacagctgtcacacagaagcatatacagctgtcacacagcagcatatacaactgtaaaatagaagcatatataagaaaaagagcccaagagaaggcacaagagtcaaacacccacttgtctataagaagcattctcccaggaacttgggaagctatttcccacttgccaaaagtagttttctttttagccatagcagaagggatgcattgctattccattaacctctgccttcctctcagcataggaaggtccatgctagccttcagcctctctcagcccctactcacagatacttgttatacgcttcaaagcttcccacccagctcggaggctcccttcctcccaggtgcccagcccttgtatcccctcaagttttcctccccctttctctgtaccccgtaccccatccccttggcagtttggaataaacttttacttctccacccttgaagtggtaattttcattttttttctcaccccttgcattcagtagacacacacacacccctgcataataaaatgcattgtttttgttagtattttgaggaaactttgttggagcaatgaagaatatgactcttgtgccttctgttgggctcttttccttctgttggtttgtcttgtccaacttcagtgtggtagtttttttatttatcttattgtattttatcttgttatatttaaaaagcaaattaacaaatgaataaaaacctagccactagggtaaaggttaccgactgatctgtccttatacctgctgggggaggggaaatcagtgttctccaaggaagtgacactgggtacctcatccactccagagcagccctcatgctcaggagtagttggccagtatataatggactccacaggtgtgtgtgtgtgtgtgtgcgtgtgtgtgtgtgtgtgtgtgcttacttggttacaggatttttgtttgtttgttttttgtttttgtttttggtggtggtttattttgtttccttttgggggttttcctgttgcattgggcttttgactgtgtttgagaaagaacttcacattaggtgggtagggagaggtagaagacctagaaggacttgggggaggggaagaatatgatcagaatatatttgaatttaaagaattgttttaaataataaagagtaccacaattaaaagggatataaaataattttatttcactttctcttaccgcctggtgtactcccccccccacctcctttttcttacctactcttttctttttctctaaaggacttcctttaacattccttagtttgggtttgactgctgtgaacagacaccataaccaaggcagctcttataagggcatttaattggggctgatttataggttcagaggttcagtccattagcatcaaggcaggagcatggcagcatctaggcaggcatggtgcaggaggaggtgagaattctacatcttcatctgaaggctgccagcagaatactggcttccaggtagctaggacaagggtcttatagcccatgcccacagtgacacacctacttcaacagggccatgccttctaattatgccactccctgggcagagcatagacaaaccatcacaccttccaatgcagatatatttccagagattctctccagctttgatttagaaatcccttcagcttggaaggatgaattcactagactcgaggctaatgtttgtttctttcctacacttttaggtctcttcacgcttgggcgatttctgagcattagcaacagtgttctctttgcttctcaaaagccagcttgctttttcccgatagtttacttcaggaattttcattaataatttttcactaactgaagcttggacacagtaagcctaactgcattggctttgtgtgtgtttctgtgatacgtgtgtgcaggggtatgcacgtgcatatgtgtgtgtgtatacgtatgtatgtacatatatgtgcatatgaagatataaccgcgtatgcatgtgcatgtctatgtgtatagtatgtgtatacatgtgtatatttatcctgcataatattctttgagcttggtgcacctgtggttttgtgtccgacctttggggggagattctcagcattacctcaagcacttctgtcccagtcgtcgctcttctttcctctccagcgctcccctgatacaggcctgtaggtatcgcacagctctggcatgttttcttgtctcggttcttcctgcctttcagttggtgggattctgttgatgtgatagatactgtttcctgaacacagagctcaccaaaagctcttccttatgggttctttctctgtggctccccggcctatccattcttaacatgctgactacgtgttagaaccgttcccttataaccacagtcgcgttaagttcctgattagtgatttctacttataatcggacatgagggctgcgtagagggcacagctgtgactgggcctctagcagatgtgataaggcgtgggagtgaagcctcttgtgggtcctctggtgaggtctccgtggtttggtgagcctgcgtagctgctctctgaacctcacaagtgtttcttaggtgagagggtagcgaggttgggatgaagtgggggtcagttatgatcttatattggcccggcaggttatctgtggttagtttcccctgtgcagacctgcctgtgtctttcacactggatccctttcttcgtccccacccgctggaagcatgcaggggttttcctgtggacatttctgtcccaatccactaggttccttctctgtgtctggtggttgtctctccagtggtcgggagacttgctgctgaatggtcactgttttcaactctctgctcgataggcagaggggtgactttctgagcatcttggaataagaaaacaatttttgacctactttttgtttttaaacatttatctgtgtgtgtctgtgtgtgtgtgtgtggcgtgcgcgcgcgcgtgcacgtgtgcttccatgtgcatcccatgttggcatgtgtgcagatcagaggattttccaccatgtgagttctgggtattgaactcaggtcatgaagttggtgagcaagcacctttacccaccaagcccccttttactttttttttttttgtctttgaaaagaaaatgtaaggctggtgtagcagcacaggcctttaagcccagcactgaggcaggtggatctctgtgaatttcaggccagtctggtttacaaagtgaattctagggcagcgagtgctacatagtaagacagtgtcttaaaaacaaaaacaataacaactacaaccccaaaacaataacaacaaaagaagatgaagtgtaaataccccccccaccctccggtcgagatactggccctggccgctcttgcagaaggaatgaagacgaggatgtaatcacgcccaggtgtgctggaggaggaggcttttattgttgatgggagagagcgcgcagccagaggcagccagaagagtccagatcagggggagaaactagcagactgaactgggccatgagaagggagggggtgagcatggagagaataagggggagggggaagagaggaggccaagagaggaaccaagaggccaaaggggacaaacgagggtggccacaatggctgggttatataggaatcagaagctcggggaatggaagatgtggtagcttttcctggtcgtcagcttgacgacatctgaaatgaactccaatccagaactggagggcacgcctgtgatccagatcttgaggctggaaggcacaagtgtctgacatagatcttgaggtgttgtggtcatgaaaagcttaggcccaggcaaggtagtacatgagacttaattccaggaggctgaggcagggagttcaaaggtcagcctgggacaaagcaaatcccagatccaggagtggtgatacacacctttaatctgggtcacaccctaccttaaggacattggaagaaggaagatttgctctacttgcaatgacttgccagcacatctgttgaaatctactcctgcaggattccagcttatacaaaagaccaggtgaatcacctagcctcatgggactgagcaactactagattcgtggattcccatccacagctgcccattgttgggctagttggactgcagactgtaagtcatcacagtaacttcccttaatatagagaggcattccataagctttgtaactctagagagccctgactaatacagaggggaagctcaggggtgtgagaggttagggtggggcaggggtgagagggttgagaggagcttgggctctgttacaggtgctcgcagagccaaaagagccaggcagccagctctgctatattaataagtaccacagttagccctttgtgatagattaataagtaccacagttagccctttgtgatatattaataagtaccacagttagccctttgtcctgtgattcttcgggatctgacaaaggcagaatacgaaggtttcccagaaacctgcatggcagctcccaagcccatgtaactccagttccaaggaacctggtcgacttttccgacctctgagggcaccaggcacacatgtggtgcacaaatatacttgcaggcaaaacacacacatcaaataaataaatctgaaaaaggggggatactgtttgaaacttcccttatccaactaacacaatatagaccaacccctgttccctgtaaatgataaggtcctatgatcattaccgcctgtatcatttgagcatagttgtcggtttgcttcacagcaaaggggtccagcagttggctgccatgagtatctgcaaggaacgcacttgtttctgggccctcctccctgtgcgcttggtgcattgtgccatccgtgctgcctgcttttgtttttatccagtagtgcaccgtgtctattagagagatgatgtatctaagagcaaatctgtaatgtacggtgtagttaatttaaacttatccctgtctagcttacaaacgaatgagactcggactgtggttattttatttggctttgaccaatatttgactggggagtgacccataatctacttttctaactgctatgctggctaccctccccagcagtgtaccccagatacctgctgtttctcttggccatctcccctcatggtggcttcctcctccgtgccctttctccctcttctcttcctgtgacccccagccatgtaactgaaaacccacctacctctatttcctccagtaattgactgtcgccaattttattcaaccaacagttttaaattacagagtaatgtttgcccaacataagctggtatacatgagaattcactcatcttgaatatacaaaatttagcatataatacatagcaacagaccaaacctcaacagtacgtggctcttctatgcccgctcctgctctgaaatgagacagaaactaggtactttctattagtgagtttcttgtactatagctggcctgggtttatctattctaactagagtatgcttggcctggcttacttcccagccacttggcattccctgccatctgagccttgccctggctccttctgctccacatgaagcattacggtgactcccttggcaacctgctcatggtgcatcctcctgatccctctcctctcctcttcccctctttctctccttgggagcccctgactgggatcagaagtctccccttaactcttctcctgcccacctacaagctgattagttctttttattaaccaagtggtggtgatgatgggaaactatctttacacatcattgagactagagatgctccaataatcacggcgatgccaacgtctgactgcaacctggtctctgggcagagaactcagcatctcaagtgcacagtacgcaaccaaccccccccccccccagtgtaaagcaacatgaaatgtggtaacaacagtgctcaggtgagtttcctccagcagaacctgccacgctcctcatagctttacatctcaaactgtgaagaagaagaagaagaagaagaaaagaagaagaagaagaggaggaggaggaagaggaggatgagaagaagaagaagaagaagaagaagaagaagaagaggaggaggaggaggaggaggaggaggaggaggaggaggaagaagaagaagaaacagagagagggagagggagaaggagagagagtttcaagaccccactgagtgaagccatgactcatgattcccatctatatcctttgtgagtgatgttgggaatgccgtcactggaagggacatgtaactggtagctgcaagtgactctaattgtgttgaagggactttgtctggggaatgttgtgaaataagatgtctgcactgagcagtggacagacttccatatattaagcagaagtgtccactgtggggtgagagactctaacatttgccttgaccatttagtgtgtggagaatttgaatagggaactaactgggagtggatgaccttctgacccagctgttgttatatttactgattgcttttaagcttcaaaagcctcttcctgtctagcttggtggcacaccagtcacagcacttgggatactgaggcaagcagatctctctgtgagttcaagatgagagcttggtctaagtgagttccaggtcagctagggctatgtagagagactttgtttcaagtaagtaagtaagcaagcaagcaagtaagtaggttagagagacccttgttacagacaaggaagctcagagaagtaaatgtttccagggtctcaaatcagatgattttacttaaactcagccctgattctggacctgggattccactgaattcacctgcttgtgtgcagcccctcggcatgcattgctttagtgcaaagagcaagtgcttaatggctttctcaactttgttaggcctccttacttgagacaatatgaggcattatgaaatctgtagtgtgagccagtaagcagcttttttttttttggtttctgctcgattcctttcctgagtttctgtcttgacttctctagtgatggcttgaaacctgtaagtgtaagctaagtcaagtcgttcctctctgcggttggtaggagtgttttgtcataacaaatgaaagaaaactagaacagaaattggtgtcaagaacagggtgattgcagactgtgttttttgggggacagtattatggaaacacattatagaattttgagctggaaaagccactgagtgctgggaggatagtgggaggttagtgggtggttagtgggaggatagtgggaacttagcgaataggagggtggaaggaaacgcagacaagggaggattggaatataaagttcagagggcagcaaagaccctagcagtcatttatgtgataatttggattaaggatctgcaattagtggtcagctggggctgaagaatcagcttcgactaccaagggaccagcaccacagacgtggaactgtccatgctttgcccggacaatagggccagcacacagaagatccaagcaggccaaggctgcatctaaagctgaacttggcaacatgtaagagtctctcatgtgatattggttttgaagatgtgaaagcttgcaaggttgagggaccgaggaccaacaccccatgacattgttggcggccaaaggattcctgtggtaaaggtgcagcatcctttgcaggggagacccagggcactggctggagatgagtcctcatattggacagctgccaatgaagcggcaggtgtgcagtggagctggcctgaggcaatgacataagctacaggtgctgctgctggccgagctagagaagcagaactgcccaagagagagatctgtgtagcacatagcaatgcttgaggggcggggccttcaagcctatagcaacgctcgaggggcggaaccaccaagcccattgaaactgatgcctaaagttgggcacgcagttacagtacgtggcgtatgccctgctggcttccagccatgctacggtctagcctttcttgcccacacctccagtcctccctttgggaatgggagtgtatgccacaagccccatttcattttagagcttatcgatttcaccatcttaggccaagaatgattgacttctcattcctaagtggcattttaaaaatcaattttgagtttgaaaaagttataaaaagtgttgggatggcatacaagccattcagaggtagaaagaataaagttaaatgttaacatcaacatagacgttttaataaaagtcagtaaggtctctgttaaagtagcatcacaaaataatacccgtttcagatgtattgtccggtgtctgaggggtggggggtggggagcaggagtaggtctttgtaggcgtgacaccattagcagaactagagaaaactcaaaaagagaaagcagatacatctctatgagagttccctctttatagtaagagctctgcagagaaggctaaaaactaacatcaatatgggaaagtgttggccacatatgtagcaaagagttattatgcagaacttatagattaataagcagaagatggactgttcagctaaaagtggaataccaatatacaggcacagtataggcaccgatggccgccagcacatcccttcccccctgactatacccatcactgcccatcatttgccaagttggccttgggctaagagcttcacctcaacactcaataaagcaccaggcaaggtgcatcagctcccagagaaactcaggacaaatggctaactgtggtgcctgtagcttacgaagcgcatgttgctctcaggctctctcggcaagtacctgttacagaatccatgctcctgatcctggctcctctcagctctctcaccccatgtcccactctaaacctctagcttgggggctttgcttcccttgccccccagcttctgattcttatgtaagccagctgttaggccacatgctctgtcttagtcagggttctactgctgtgaacagacaccatgaccaaggcaactcttataaggacaacatttaattggggctgacttacaggttcagaggttcagtgcattgtcattaagatgggagcatggcagcatccaggcaggcatggtgcaggaagagctgagagttcttcatcttcactctgctagcagaatactgacttccaggcagctaggatgagggtcttaaatcccacactcagtgacacacctactccaaggccacacccactccaaggccacacctactccaaggccacacctactccaacaaggtcacaccttctaatagtgccactccctagaccgagcatgtctaaaccataacacggtccttggttcttctctcttggtcctcttgatctccctcttcgctcttcagttcctccctcttaagtttcctgttctctagcgcaacagcacaggctgcttctgtacttgaagagaaaaatgcagtggacgcaaccagaagttactggttttgtagcagatcagtaattattggaaaatagtacatgtgttacagaatttttttatgtcaaattgacacaagctgggatcattaggattgccctggaagcagtctgtaggacattttatttattgatgcttgacgtgggagcacccacttcactgtggatgggtccacccctgggcaggtggtcctggatggagttaaaaagccgggggagccagtcagcaagcagttctcctccctggcctctccttcagttagtgcttccagttccagccttgacttcccttcatgtgggactgtggctgggccatgaaagttgaggtgagccctttcctgccacgttggttttggtcatggtgcttatcatagcggtggaattcctaacgaggacagtactctcacagctggggaacgtcagtgcacgaagtttgcgataatagattgtgggagcatgtatgaacgggcatgctcttcattttgacagtatttatcacaggctgcgcccttcagcatagcgtttctacttctaagactctttctgaaaggagcaattaaaaattgattaactaattaattagtatttatttgagacaagatcttgctttatagagtagcctggctgtgaactcatagagatccacctgcctctgtcccaagtgctggaataaaaggtgcttaccaccccctggctctataaggactaatcgggcaagtacttgtatataaaagcatattcctaccagtattgtttatataagtaaaaggcccaaatcagtatctgtcattgagccattgctcaactcaggagtgggagaactaaagtggcatatctagttactaagttttaaatattgctcctaatttccaactggctggaacaagaaggcagaacaaagcagttacgtaacaggacatgcggctcagcggagctggacagctccggtgttatgtgctgaagtgtgcctgccagtcagaggctggggagcctggcatgtagagccgatgtcttttctcccgtatgccttcctacagtatctgcggatacagttttactattacatttgccgaggtatttactctagttggtaattttttttttcttcaaaatggtggcgcatctcaccttgaagactgagctcacgggttggtgactaggaaagtgttctacaaaagctcgttaactttgcgttcattcatgagtttgggggtacttttaaaacttccatttccttgagagcagttgatgcaagtatcagattatatatgcacacgaattctcaggttttcccaagaattttaatagttgtccagctgtctggttttcaattccactcagtgtgaaagctgtgctgagtaaatttcgtggtagaagtgaggaagtcctactgatggtccctaaaccagtaggtttgcaatgttagctttcctcattggactcgcgtaccctcttaactccaaaacgaaatgtcccagtaggatctaaccaagtggctgaggggacctgcccgaggagtcttgataattttttgataacacataatcttaagcacatctgagctccaggtctagagaagactcctttttctgatagtcagtcatgttaggaacatcttgaaggacctgatagagccaaaaccaattatgaaacgagatgggcttgggggtgaacctttcatctcagcactcaggaggcagcggcaggaaggtctctgcacatttgaggccagcctggccagtgtagtgagtcccagggcagccagggctgcatagcaacattccgacccagataactaaggagcagtgagcggtttgcacagtggctaaccatcatcctgcatactcaaagagcaccggccagtgataacagtaaggactagtcgacatagcgcctcccagtatctggacacagatgtgtgcattctgcttaaagaaacaggtggatttagaaagagtgcttcatttctcaccagaaggaaaaagagaggcacaggtagtgaagacgctgactttagaaaactctagataccttcagggagcaagcagagcaaggagaccgttgcagagaaaatgctcaaggaaggcctttagaggagccttttaatgcagtaggaattctgagttcatccctaagttgttgcattgacacagtcctttcattttgatattctcagtaaatgtgtttttttgtttttttgtttttttttggggggggggtcagaccgacctaggttaaaattaaaatccaggctccttcatttggagtagtttttaaaaacttgagcaagttcaagctttcctaagcttcagtgttctcatccccaaatggaaacctccggaaggtgccaagattaaatgagatattgttataaataacctaacagtaccacactaaatgccagtaaagtgcccggtaagtggcttattttgctgtgcacatttgtttattttagaagagtttatcgtgctacacgataagttgacagtcctaggttcacacctgcctccactgtttgataacacataatctcaagcacatccgagctccaggtctttgcccacagaatggttatcagtactctttatcttgtcagaacttgtgaggtcagaggcaacccagtctgtgctcgccagagtctctgcctgggacagagttagtgctcggtgagtggttattgtcacaaagcgaataagccctgaagagcgtcttaggtcttgtcatatttcccctcctgcctttgctttttacctccagctgtagtctttaagaatttggatgtgcacaattaagactacagcccagggccaggttaagatgtaatactcaaatgtgtattacaagaggaggctggagagatggccgctctcgtggaagactcagatcagttcccagtacctatggcagctcacaaccatctgtaactcgagttccaggggatctgatggccttttctggctcttgtgggtaccagtcatgcagcgtgcacagagacacatgtgacgctatacttgagagagacacgcagaagcaccacgactggtgggctgtagtagggaagggtatctgccctcggcctttggtctcttgggaagaagtgtcaagtggaacatgtgctgtcccgctcactgacgtcactgatgaatgggatgtcactgacctttgaccgtgcaacccagctgagcagccagtcccatcatcgctctggaggtacctggcatgccagctggcacgcacattgatgaaacccttcctgtggcgactgccccctggacaaacttcttccacacaccccgtcatgttccactagaccacggaatgatgcctaatgtgaatttccatatgtctgtcatctacaatctcctgaccatctacgatcctgtcgttgtctaggtctctagcccttagtgatttgcatatggcagtgaacgtggacaaatggtctcggacctcaaggagcttacgttttagaggacagaagcatcttttttaagtgttacaacacttgctgtttggagcaagtatggaaattctgaaatcagaaatgctttcctttggtcggtgaggaaagcgcaattaaataatcagcccagatcgcagtgttgtatacagagcctgcatttcccaccctcatctcagcaccgttcttttacctgtagtgctgcatttcttttctgaatatattttcaggcattaacagatccccaccttgagtttttctttattcttcaatcatagatggtgtagggaacttgaagggcgattatgtgagttccgttcattccttgatgcatttattctcattgcccttaaagtgggatttaaaatccagaacatcccccgtagtgccttaccagatctggctcatgccatttctgagctctgcatgcagacctagccctgtagtccccgtcttcttctggctactgtgctccttccggcttcagaccgctgcccttcctctggctcagcatgttccttcttcctgtctcctccacacattaggccagccttgcttcatgcacagagctcagctcatatccccatgtgccatattcccatgtcctttttcttctacagatttatgcatgtgagccttttgtcagcacatgtgcatttatgccacgaatgtgccaatatcagtggcattcggcagaaggtgctagatcccctggaactggagttatggatggttgcaagctatgtgggtgctgtgaaccaaacccaggtcctctgcaagagcagcaagtgcttgtgaccacagagccatctctccagtccctgcacttgtattttatagcacacccagcacagtacatggctatgatgactgcctgctctcattcttgaatggctagagcatacgagggtgtggcttctacctatgttctccctatcactgtttccctaagtggcttcctgttgacactgcaaactaaatgaatggatgaaggaactcagaacatcatgataaagtttaagtgcatatggtgtgtcctcctgggacatgactttagcaatgaacgcagcttataaagtagtgcaggtttctcatgttttgctaatgtttaaataaaaaagcaggataacatctactaagatttggaaaataaataaacaggctgcaaaatgtaacacgaagggatacagacctggtggagacaggggttggggagaagagaataaattagtttattgtctttttaaaacgtctctttccccttagactgtgaatggcttgatgccagccaccaaaacttatgtttatatctttaggaagaatatattcctctgtacaaatcaactcttgagcaaacttgaataagtcgtagacctttggagccaacttcacatgttcttaatgctgatattacacacagaagcagtataatttatgcaaagaatactgtatacagaatcagagagctctagtatcttagttactttgctattgttgtaataagccaccatgagcaagacagtttatagaagagtttattggggccttagggtttcagagggttagagtccatgcgaatgatggcagggagcatagcagctgacaaagaggcattgtgttggagcagtagccgagagcttacacagtaagacacaagtaccaggcagaggatctaactgggaatggcgtgggcttttgaaacctcaaagtactgccccagtgagacacctcttccaacaaggccacacctcctaatctgtcccaaacagttccaccaatgggggtgggagggcaagcattcaagtatatgaacctgtggggtgccattttcattcaacttctctaacctaggtttaaaattacaattaagtttaaaacctgggtttaaaactataattaagtgaaggttaattgtgcctatcaagtagagtgtgctgtgcaggcgtagtgtgtaaccaggtatatctcagcaggtgtagtgtgtaaccaggtgtatctcagcaggtgtagtgtgtaaccaggtatatctcagcaggtgtagtgtgtaaccaggtgaatctcagcaggtgtagtgtgtaaccaggtgtatctcagcaggtgtagtgtgtaaccaggtgtatctcagcaggggtatgtgcatcctttttgcctttctctttagcctagtcccagaaatatatagtaaatagatcattaaacagaagcaggtaacctcagggtctttgaatcatagcaatagagttataccttgtttacccagacaattatgggatgcttcacctgcaacccaagacagtgtgtaggagctggggagctgtccattcttgtccacagtcagactgtaactaaaaatatggaccaaacggtttttctaacatcctagggttcaaagctgtttgtccactgtagtaagttctgtctttccagtcttacaggcaccccccatgctcacttcctacagcagttccttgcgttgctaatttcatctgttctttagtatccattcccccatctctttctgttctttaccacctatcacccccccacacacacagttaagatggggagagggtaagaatatggggtgatggtagagcacatgcctaccatgtataaggttccaagtttagtcctcaatacagaaatcaataaatgcacaatccttgtatttatgtatctgttcatttcttttaaaagatgagtggatgtcggatgtgtcaaatgttgatggtagccaccaagttccatcctgatttcttttggaatgtgtctggagttggtgagttctctggttgcccagccgccccccccacccccactaggatacagaggccacggaagtatgaagagtgttctttctcctttgattgtagcgtgatgaggtgcggaaggacagccgctgaatctgcaaccttatgggttagaaaccagaaatacagcagccaccttgtgttagttcttgtgaggcactacacagacaactaggtctccaaggagtttggagcccagtcaggggagatggacatgagagcaggcttggtgccatctgagcacatagcataggcacatgcatgagggagggacagaggaggcagtggtggggctgtgaaggaataaggcagagcttgccacgtaaacagggtgaggggacagcgtggcgtgttcagggatttctgtctgtgtggctgtttctgtactgtcaggtgtgaagtgtcacggtgcgaggctatgggatctctttttctttacttggttccccaaataaaaatgaagccttcccatctgtctaggatagcatgggtgatatttttcctaaacattgtacatattgagattatattagctaatttaaacagtgtacatattggaaattatattagctaatttaaactgtgcatattgagattatattagctaatttaaacagtgtgcatattgagattatattagctaatttaaaagaaagaatccacattttgctctttactagtcagcctctagtgccgattaggtgtggggttttgaaccacctgaggtcatcttttgtgccctcttaggggcagacaccaccacaaaagcattacctcacagaaggatggtctatactgtaggcagttcccagggacttgatagagtagtgaggagaagaatgggggcggcccccaccttgcccaccgtggctggccatgcacctcggatactgtgtacctttaaaatcacacctgttgtacgccttggtggcctttccaggccagggatctgggtagtcagtttatagttctaggaaccgagcgagactgctgtgttagcacttgtgtgccttttatgggccagggaatggtgttgagggaatctaggcagctggaacctgcagccctagcagtttggtccgaggaagaactttgggggtgagaaaatacagctcattatataaagctatgctggtgctcacacagcttggagggcagaggaccagtattccaaaggcaagggggagtgacctgactgcctccccccaccccccctgatcctttttgtgagagctgcctttgggatcacagtggcttgctttgaaaagggcggcactcttctgttgctgcctctgagttgttttgttaattggcacaaaacaacagctacacacacacacacacacacacacacacacacgagattatattagctaatttaaacagggtacatattgagattatattagctaatttaaaagaaagaatccacattttgctctttactagtcatatatgtgtgtgtgtatatgtacatgtacatgtacatgtacatgtacatgtacatgtacatgtacatatacatatacatatacatgcaaggttagaggaaaaagggctggctgaagaggggctgggggtggggtggggaggcgaaaagaggtgcagaggacctgaggcaggtcacaggcacccctgccactctgccatgggaggctgtcaccagcccatcctagcttccctccttgagatgcccttgccagcctcaggctccttacagcagcaaggtgccgaggtggcccaactcagcaagctgggcaagccagtcctaggacaagcccgccaggatcatgccaggatgccaaactcttcagcctgcccaatgccagcttcagcccaaataaaggtggcctatcccgttctgtgcataaagccacaaacagtaaaaccccttctctgtggaaaatcccagaagataacgggccagagtcaagaggaataagacagaaagtcagaacatttaaagctagagagcagaggaggatgttcaggtacaaaggagaaagaagagaggcacgcctggttggcttcggaaactgtcacgaggcgaacccatcattagtttgctgcagctgctttctctgatctagtttccattcttaaagtgggactttgaaatgatatagggaatctggagccgagatacggtgtggtccatcccctgttccagttccaacctgacccgggttgggttgtgtcctgcctgtccatcctcactcccagccccgcccaccccgtttcatggcaactacgtaggtgtctgactgacatttgagctgaacttgacagactgaagttggcagttgtcagagtcttgtagaaattagagaacgctgtgggccaaacactgtagcctcttttaaaaggtatacaccctgcttatttacagtatgaatttgatgttgatacttattcatcctaaccagatgtatcgaacgatataatccgttatttttaaaacgtgttaatttggttttataacaccattctggttgtagtgtaagccaaggagccagatttgcctgagccacagatctctgtattgacacccgaggatttcttttttaaaaagactcctaagattaaatatcaagcatacagtcagcacaatacagtcagaagtggcaaggctgttgtcagttcctgttggcatgctcccctgaaccaccgaattttaacaacacaaaagaccaccacctccaccaccatcacaaaaggaaaacccaaatccttgaaatgggcaaaaaagaaagatggctgaggttaaaagtattgtcctcatcttagaaataaaggaattatttttttatctgttaaggaaaaaatttcccatgctgtcccattgtcttagagcggaatgcagggttttatagggagaagactagaaaccactgtagaggctactcattttcaccaggccttcctgcctcacgccatctcattaatcataagaggctttcgttaaaacattcaactcatttattttggaacactcgacttcagaagatgctcactgtttcttattacatagaaaatctaaacattttctagtttaaggaacaaagcataaactaagacttcgctggggctggggtggaggtgggggtgggggtgggggtgggggtggggtctggccaaagagactggcagctcgtagaagagagcttgtcctgagccagttctgtgtgcatttacagcaaccagctgtatgcaccaggactggagtgccggcttctggcatcctcagctgcatagaactgacttttaaagtagaaaaaacaaaaacaaaaacaaaaaaccccaacatctgctgaaggagaccaggtgatttctagatatttaatttgatgagttggaattagatggtcaaggggaaataactgcttttcaatatctaagtgttttcttccttgaaaaaaaattcagttaagtgtgataaacgcccaggaatgaggccccatccagccacaggaaagacattgtggcttttaagctgctggcacttttctttgatgttaatattcttttctttttttaattttgaaggagcttattagatgtgttgctttcccataggattccatattgtggtttactttcaaattatgaaatatttttaaaagagtccgggtgaccttttgccatcagttttgttcctgtgacacatgagagcaatatacagtttgttcttagcatataagactgtgtcttagtgacaggcatgcttttgtggtgaaagacccaactggaaaaatgtcacatgtggtcactcataatcatttggaaattcacttgtcattaaagaatacaaaaaagcagccacagactagcattgctgggctatttatgattactgtagcagttttgtgtgactgggctccctttcctaacagcgagatacaaagcaagcagcatctttgctcggagggatgttcctctgataattttgttgtatgagagtctacctgctcaaagcagttggactttcggttttaagcggctctctgcctgccggctgctgtctgctgcttccagctttgcctgtggcctgctagccaagtaatccttacaacatttttctttgctttcttataaacagtttagagtcctccttgcctttcttgaggcctgcggtaaagttggaagaggggaagtccatatgaaactgtcctttgtcttttcctccatactctatgcaggagtacccagagcggcttctggggaggtaattttgtccgcctgagggttttacaataggttctgttgttcttatgcgtaggcaaagacatgtctttttgtttagaggattttgaaatgtgttcctccacccagagcacccaagcccaggctaagcacagaatccttttataactacaggttatgatctgattcactagaaacaagggccggtgttaaaaacagagcctaaggatcttgagcccctctgtaaggattaccaaaagaaaccagtgaaatgtatcaaggaaggaagctacagtcaaaactgtatttcttctttaaaattcttaaggctcataggaagctttgcatctgattctcagctaccaaaaataatttgtgtgtggaagatgcctcagaaatggaatatacttaggcgcccacggctgactgcttttcagatgtgtggttatcagttgtagcttgaatttagagagtacgagatgatgcagacagggttcctggggggttagtttgttactttctgagatagttattttctgagattctgatgagaagcctgacagaatgccttcaacctctgtgactcccaggaaatgctgttagctttattctggtttcatagttttggtcaaggtagattccagaataaaacagacattttcttcttagtaaaaaggggacgaggcatcctattcctaggctcggaactaaggcaagtcttgcgcttaccctactctgttgcattctcgggttatcagatttgcaagtcggagttggggaaagtttctatcgggactcaagcaactcagcctccagtccttgctaataccaacaacccgaaggcagttttctaccacctgggaaagaaaaaaaaatctttctaaaagatggcacacggcttgctttcctgtgcactttcagcaggtctagagctgcatctggccgagtcgggtaatccaatctattttaacgcaaagattttccgagaaggcaggaaaccagcaagggggaaggctttcaggcatctgctgtttcgtttccagatcccttgtgttaatttaatgtttctagggaacccggggttttttctcggaatctcttctctaggaactggtgtgtgccgcgataaggctaagactaagggggctgcagccggaggcagcgtccccgctccagggtgcagactttccccgccgccaccgccaccgccactgccaccgcgagggtgacagcacccttcgaagagtgagtgtttgcctgtgtgcaattaggaaaggcaaccccgtgaagcgatcgacatgccctcaccccatcaaaaccagggcaactcgactctgttgaggaaacaaactccattccatcccaagccggagtgaaacgtgagctttgcacaaacactggcactgcttcgggaataccgggaaactcgcctttcttccagcggcctccgcagagctttgcccagacagcagtactagcttgctgggggttttagtgtgtgagatgagttttggttccgtgcttgcagccaggtgttagcactggtgtgtgttgggccctatcagccctatgaccaacagccggcctggcctctccagcgtctcctctcccgccatggacctgaagcctcactcaaacctcgcttctgcaaaggcgtcctgtagacaaaagcctgcccttaaaaattttaaagactgtatgctattcctgtttagactcacgcaatggggataatccatgctgccctgaaaatagggttgagaactaagatggagtgagttcacgtggccctttaatagtagaaacagaaccggaactccgataaacccagcattctgttactgagttacagaactattctacagaatcctagaggtggaccagagtgttgtcctcttgtcatcccccccccccctatgacattctagcaatctggctgtttctgattgctgtggttgtgattgcacacaattccatcgctggaaaactctaatgattgcactgttgtttcgaacactaactggaattctctgagaaactgttctttaaacaatgaaaggctaaaattactcttttccgcatatttttaattggtgtggatgtatttgaaaatcatgataaaaatgagctttctattgtgttcacatttaggttccagtccaggctgtgtgtgctatgaattattgggaacaatctttggtttctaggtagtgctttgaggttatgtaatgaaatgttatattgtaatattttaacattttaaatgatttgacacttaatatttattatttttttttatgtgctttggtatttgacctgcatgtatgtctgtgtgaaggtgtcagatcccctggaattggagttatagatacttgttaactgctatatggatgctgggaattgaacctgtttcctctgaaaaaacagccagtgcttttaacaatggagccatctctccagctctcctcctcctattattattattattattattattattactattactaatgtgtgctccagaggacaacttctgaacagttgctaccttctttgatacagggtctctcattggcctggtgctcatggattaggctagcaagcgccaggataccttgtctctgtctcccaggaacggcattccaagcctaggccactgtcctgacattttgtgtggttctgaagatctgtttcagggcttcatgcttataagcagcagttcccaacgtgtgggtccagatctctttgggagccgaaagggcctttcacaggggtcacaggtcagataccctgaatgttgcatatttatattacaattcatagcagctgcaaaactacagctatgaagtagcaatgaaataatcttacagttggggggaggtcaccacagcatgaggaactgtctgaaagggtcgcagcattagggaggttgcgagccactgtttataaggcaagctctctattgagagagcaatcttcctggtcatatcttgatctttatagtatccaaaaaaaaattatttttctgtgtaactgagttaagttggaatcactaagtaaagataagtgagtttaagaaagtcttaaactgttttctttaccctctgtattagttttctatcttgcataacaagttccctcccaggttacttactggcttttagcaatacacactctcttccacctcttgctgtgaggtagaaattggggcgggaggatggctcctacgctgtctctgcccagggctggggcgggaggatggctcctacgctgtctctacccagggctggggcaggaggatggctcctacgctgtctctgcccagggctggggcgggaggatggctcctacgctgtctctgcccagggctggggcgcgaggatggctcctacgctgtctctgcccagggcctcagaaggcagaggcagcggcaggcctggactcttttatcactaggacttaatccagtttgttggttgaacttagttccaggaggatgttggggtgggggtggggcaccccatgttgtctttagctgcggtggggttcttctgaggtctgcttcctttcatctgcacagccagcaatagcactcgggaggagcccggatcctggcctctctttccggcttcccttcccgcagagctcaccggtgtctttagtcagctgacttacagtaaccttaattacacctgagtggtagcaagtattgtccctaagagttaaaggcttgagtgacagggcttttgaagtagaaatggtttgaagtttgggtatcaaacccctctagacacagtttttcgatggtggcaacagacagaattaattcatcctttaaagtgacttttaaacatcttaagaattaactttttttttttttttgtaagataaaatttaaaaccctggtgacatcagatattacccattagtcatctttttgagtttatgtaacaataaatattttccataattgttgcctccttcccctacccccatgagacagggccttaccatgtagcacaggctgtcctggaattccagagccttccagaatgctccctgagtgtcaccatacctagcttagtgtttcttaaaactcaacctctgctttgtaaaatcttctccagtctttggtttttgatattataatggacgtttacagtacctaaacacacacataataatacttgtgagtgcttttcatgtaaactctgatttcagccttggagaattttgaatgtactaaacataactactctagatttcaattttcagtgagaaaaccgggtctcctgacttccctgtcattaatgagcttgcagcttcttgtttgtaaggcaaatgtaaatgctttcttcatttcttagaggtctgagtgcctctcacatcttactaggcttgcttttatattttaatttactgtttataaaattggattactattgctttataaattctatttttttctttcagaaaatggtgtgtgtgtgtgtgtgtgtgtgtgtgtgtgtgtgtgtattttaggcaagcattttactgctgagtcaaaaagtaattagcttcatagtcacttgaaaacaggaaaattgggtttctcttgaacttgtcttgttttgaaagaaagacatttggttctttccttctgctgaaaaggttaactataaattgcaacaaaagtcataaaaacatagttttggcagaagcttaaatggacagtctgacagactggaggcatctgacaggatctctctctctctctctctctctctctctctcgtggtggttctgttggaggtttctctgacgattctctgagaacaggaagcaagacttgatttttgttttgttttgttttttttgtttttttgcttttggctttctgttttgtagaatgaaaaactttagcaaggaaaaaaaaaaagaagttttctcaactgtatacttaaacaaaacaaaacaaaacaaaacaataagaacttttcagcccaagaacttatggtattccagagtttattttcaagttacatacttgatattaaggatatgtttttctcaaggaaataatgttgtctataaagtattttggattttcaataaacccaaaattcaaagaagttaaatctaaataaacacaggacttcaattttgcacccagacccttgtgggacctgtctgtgatgtgagacctgtctgtgatgtgggcaggtgatgttggctcttgggaggttaaggaaggaggattgctgagttcaaggccagcctgggctacggtggtaggttttaaaacagcaaacaaaacagattctgctgcattcagatcttttttaaaggataatatgtgtgtacagcagttgttacatggccttgagatgtggtctggagaaggcctctataatccaacacattcatatttctgcagcaactgatgaatattcacacacacagtggcagacatacaaactataaatagtctcctgtgagctcaggtcaggttttgtcagcaagcaaacctaggcctggggagttcagttcaggtcacgccttgctgccaaatgagttatgaagaaatgctcggcctcagagcgctgggagttcagatcagcacatctctactgaactcagcttttcttttttagtaggaaaaactgcactagtgtgaaaagttctggccatagtataatatcactttgtgataaaatatatttaataccaaagattcagccttcaaaacagacatgtacaagtaacattatataaactaaacaggttttatttatttatttatttatttattttatttattttttgagacagggtttctctgtgcagtcctggctgtcctggaacttgttctgtagaccaggctggcctcgaactcagagatccctttgcctcaggtcctgagtacttatattaaaggtgtgctccaccatgtacagcaacctcttgtatttatatatttaggggcatatgtgtacacatacacaaacacacaccactaccaccaccaccaacagcaacaattaaggaaaaagaagccatgaatttgaaagtgagcaaggtagggggatacataagacaaggtttggggggaggagagggaatggagggaatcatgtaacttttaataagctcaaaaaagaataaacaaattattaaaagcccatgattcccacccaggaaaccattgctcttttgcagtagttcagtgggagtgaaaggccttccagtaaccactaggctggtgctggttggagtgtgggtacgggagccatggtctggggagtgttgagggaacatgggagagcacagggcaggatcagggattgactttccgtctccctttatttcttccctgcttctcctctccattctctatttgtgggatgtcaggcggtttgctgaagttggagactggaaagaggggtgtgtgtgtgtgtgtgtgtgagagagagagagagagagagagagagacagagagagacagagagagacagagagagagagagagagagagagcatgcacactcatgtgcacaaatgcacttgtgtgtacttcccgggatacttgagaagactgaatgtgtttcagtgagcatcagtgtggaggaactatttagtccacagcagtgctcttcctcattgagcccacccacagctcttttctcagcctcctggtactgtgagagagtcagggattagggccagagcagagctgcagtgtagcggaggttgataggtcgttgataggtttgtccgaaggagaaggtcctcagacagtgaggagagcgacagctgtgctgtgggggaatggaagtggaggttgtcgtatctcaccttattacgggccctggccttctgccttccataaactatgttactaagacgtttctaaaagaaataatcatctccgatctcttctgcatttggatgaaacaagatgttttggggacttaacctgaaatggttgtcaccatgaaggctgatgtagggtctggtaagaataagtctacgagaaaccactaaaagttgcaaagagatttcccaattttatcatgggtcctgtttgttggaggcatgctggatatttatatgaactccacaaattctctcaataacattaagtgcttaatacgtgctagtcgaccatctggggatatgatggttaatggcatagacaagatcctgttgtcatggaaacattggagagtagtttgttcgaaaaataacaagatcaggaagggtgggtgggtgagggctccttgatatgggtggttggaaatgtgtctgaggaggtgacaacgaggctggctctatctaaagaagagcaggggttagccatgaaaggccagcaaggccaaaggattaggagcaacctggtgcgtcctgggacctgttagtcatgttgctggaacttcgtgagtaggcgggagaaggccaggacagacattctaagctttgccagccctggacaggagtgtgggttttattcccggaacatgaagctcctaaggtttttttcatctggggagaaaggcaatttgcatgagtctactttgcctctccagcggattcctgcagtgttttgttttgttttaaccttgcagggtgcaaggttagtccagtgacacatttgcttttaactcaaatacaaacaatttgaagtcactgttcctctttttattttttagattttcacttcaaatactatttactgtcattgttagtgtcccttaccggtcaaaggacgcgcgagcagtcatctctgtagcacccatcagctttcctgttctctttgtttgggctttctactttctgctttcctttgctgttacagacttctgccttctaacacctgctgcccacttcagtgagcattccccttcacgcctttacgttgcgttgctcctcccactcttgggaccatgatactctctgatgtacatctattgcatggcctctgggggcattctttcttggatgcatcgctttgctttataagacttggttcactatgacaaacacagaatgccctctgtgcctttgcggtactcagttcttgttgcacgagtggacaaagctgttggagcacagacagctgggcatctgtgacaaactcgactaacatcgtatcttttctaaacagcttactgtctagggaggtactttagcctccagagtgaacacgtaccttagaaccttaataaagcaggaaacatactgcagaaggaggactgggtatacatgtgacttctggacccaagatccagcccctgtgccggccatttactgatgaattcttccaggaaacagaagcaaagtcagtgttgtggacaaccaagtcagggttcagtctcatgaacagaaatgatctgaaacttggtactaagggcaaggtggaggataacccttccaagtcagctgagggaggggtcgtgtgagcctctacagagggtagctttgatctacttatacaagatgagtaagttttggcagatagaaaaggtaatattgatggttatggatttggttttgccttacagaatactaattaggcctagaaacaatttagacctgtattcttacagtctctcttttaatttttttttatttttaattttgaatgtgttttggtgtatgtgtgtgagtgtgtgtttacacacaccaagagggcatccgataccttagccctggagttccaggccattgtgagccacctgatgtgggtgctgggagctgaactcaggtcctctgtaagagcagtcgatattcttaccctctgggccatctccccagatttcccagaatttcccttttaactgattctatgtattgtgttctttgccaccttgctgtcaataatgaattatatacatgttgacgtgcactcactgtgtatttgtgtatagatcatgacagaaatttttgtctaaggaatagttaccatttcagacccatctcttaagctgtcccatccattttgttggaaaatttactgaaatccattttccttaaaactatttacttaaagtatgggagctttatctggtatttcccacgatttcagggtcttgttggaagtattgtgctccagcaaatactcagagcacactcacgacagagttttctcattatgctgaaaacagcaatttgtgtttttaagctcttcctgtctggttttcattgtttgcccccggcctgccctagccagacaggctattgtttttttctgtgctgccttcatggctactgaaagagatcccagactcccaaaatacagtttctctgatcatttgggggggaaaaaaagtaaatggcttactttatcaggtttgcttaataaagaaaaataggaaaataaataaaaagcaataaatacacagggcttagtatataggttttgtgatacccatgagcctcctctcccagctcgtccagctctgcttctttttttttctggaaagtcaggctcctcagatacaggtttctggataagtgagcttagtgtaacttttcctttgttgattttgaaagtagttaggcacacctgattaaagcgtgctcgttttagcccagttctcagaaagctccagcagtgttggggcgctgtctgcccagctgcctctgtaaaagaatggcgaggaggaggaggaggagaaaagggggggggagatgccagggaacatcagtgtctgggaggggtgctggacgattcctctggctgtcagagggccatggagcaattgaggtggctattgtcgtcctatgtatgggacagtgatgggcctgtaggaggaaagaagaggaagtgtgggtagggaagcagccggacttagcctgcattggagacaatcacagggcaggcgttagaccggagacttcacggtacattaatgattggagttcataccccacccgtttttgctaaggactgaagtttattagttctctcctggctactggtgtgactgtggcagactcacttcaaaaggtgcattgactgttattacaattaaaactagtcaccaccccaccaggcagaaaaccaagatattttgagattaaagtctacatgtgcttagcagtgagctgagatatcccatcattactgggatgagatccccatcattactgtatttctcaaacagataaccctgggggtggttttagaaacttatcgattttatgggaagaaaaacaacaacaacaacaacaacaacaacaacaacaacaaaaaaccccaccacatatctccaaatcaataactaaatatttctcataggacatcaagaaatagaaattaactcatttctgttatttaaattattagtggctccttataggccactacagctttgggtaaaatgagcttgtctctgtagtcaagagtagtaaatgcagtgggtgttttcacagatggcattttgcacatgctctgatttgctgcaagcctaatttataggagtatttggccatttattttagattttctgcagcttgatctgccagttagatggactcatacgcaaagacctcaagccagcggtgccctagacagctttgatcctttttcttttttttcctgcaggaaaggaaaagcatgggaccttgggagtggatcagtcatccaaattcagataggtgctgttgtctgttgtgattctgttgggctctgttcttctgagagatcctcagaggtttccaggaactcaggggctaagaaatatcttaccgagaatttgaaaatatctcggcatttaattttgtgtgagtgtagagtgttttatgactctttaagttttgaggaccagcaaaatagagaagggtattgtgttacatagtgtgctagttacaaatgtttgcttttattgcacatgatgtaaccagagtggaaaaaaaccacagcagtaataatcgttgatataatcttggcttgaaggtagggggaacacggggggcaagggaacagcacaagagagaaaaatatctgttaccaattacagcaaagttactacatagttaaaaagaagttgtacatatgaataagaataggatgctctgctaactcaatcaaaagggaaccgctcgttttccttaggtacttgatgagggagaattcttcctgcacgatttgcttgaagagtggattattttgctttgtgaacctcttcagtccggtccttacagaataccatttggctaatttgaaacggttccagttctgggcttggttgaacactgccagccaaaagcctgcctgtcgtcttccattcgcatgccttcctgccctcggtgcccccaacccctatcctgcacccaaggaaagaacctgataaccatggttctctgccttaggaagctgtggctccttcaaggtgcccccctccgtcagctcccagaaaggcaagcagcaggaaagcaggcagctcaatccaaccgggatcagcagatgctgccaaagtgggaagcaacaaaggcagtccgtggatttccaggaacgggaattattggaagtctgctctttacaaaataaactgtgattgggagccgagcaccctcgcagtcccttccttctgctgcgggagtgtggcaaacagggtattgtttggcttgtcaaggtcagcccggctaattgtagatacagtggacaaatagctctcttccagagaagtggtgaataccagtcgtttgtcattcggggccccagcataagcagtgcaggaaagtattggtagcattgttcaatcaagtaggaagaggaaaaggaaggaatagaagtgcaaaaacgtaggccaaatggagtgagagtcaagagaaaccattgccctggtgctatggctgggtaaccatctcccaaagcctctcccaacccccaccccacatttggtcagcagcttgcagttctgttgggaggttctattgagaggctctattgggaggcaatagaacctttaagaggagtggcctagtggaggaagttgaatgcatgggggtaggccctgggagaggataccggatccctagcccctttctctttgtttcttggctgccaggaggtaagaggttcccttggccacacttcttttccatggtgtgccgccttgacataggcgcaaagcgaccgggccaactaatcatgcgtgaaacctcccttcaaatggtgacccaaataaaaccataatgttactgtctcaggtgtctgtcacagcaatccgaagctcctagcttgataaacaggtctaacccagtggttctcagccttcctgatactgcggcccttgaataatacagtttctcatgctgtggtgactccagccattctgtggggaactgggaataaaatggccaacagtgtagacatgcccaccacctctggggagcttccatgctacagagagctacagcccaagaagagcgctgcgaaggaaacagctggcagtaaacgagcgagtcacctacccatgcctcaggaagactccctgaacacaaacagttgaggaattacctgagggatgagaagaagagcaagagagctccagccagaggcagcagcacgggtccaagctctgaggggcagtgggctgcgccatggcactacaccagtcagggaatgagtatgcaaggagcctagaaccttcaacatgctgggttctaccctagctctactgagtgtcactgaaagggacagtagtgctgaattattgctttcaaaagttcagtctgctggatctctgtcaaatacatattagaatagaagtatggagatcatatcatcatcatctctatatctatatataaaatggagaaggtgttatgaacaaagtgatgatgtatctgatcttttagaaatgattggaattctgacaagcagatttggagaaaataagatctctagagagggtgcagggtgaccaagtgtggggctgagcgacaggaggcaagtttgcacgtgggccagcatgaagcagcagtggggacagcagctgtgagcaaggaagatgctggtccctgcccagctatgagtgctcttaaaggccaggccacacctacaggggctgctttaaatttttaatgtaaaattaaatccgagggactgctttaaaaatttatctcggcacatctcagttaccacgagagagttccggtgtgtgtgtttgtgccgatttaaaaccatctagatccatagtgaaattgtgactttcaacaagacgcctcggcatcaggatcttcatataatttgccccactctgtggtctatagaatttcacatctactgtcataatgtgctgagccaagtcggtcatggtggcatctgaggcaggagaatggctatgagttcaaggctggctgtgctatagtagaaaatcctgtcacaaacaaacaaacaaacaaactcagcaacagcagaagaaaaacaggccaagccaggacatggatgcaatggggcttctgcgccaggaacttaaacttgaaggtttatatcttggttaatttgtcattcattcattcacccactgtgtgttaactgagcaccagcactgttgtaagtacttactctgggtgagtgaagggctcctacgctccctgtgagccccttaccagtagtgagggtttggtgtgattcttggcgttagcccaggttaggaagtgacagtaaataatgatcaagggaaaggcctgttgaagcagatatctagacctgcagtgacggcctgtgggatacaggtttgagtgacttggggagagggccgcagagatctgggcccaacaagccagtcaagaacagcggcaggtaagaggtgaccggctgagccatccatcctgcctcttgtccacctctcaacagaagagttgaggcacaggcgctttaaatgtctccaggtgactctcaagtggctttgggtttattctgattacaccgagaagctttccagaggagagtgagagacagagctttattctcgaagaacacgtggagcccgagtgcagtgtgaaacgcagccagagagaaggaagggtgtcttcagggacacaggaacctcaaagttgatgagagaaagggaacgccgagggcaccctgaggagcggtggcgctggggtagcagggagtgcagctcagaggcgcaccataaagatgagtttccagtgtggcgacctcacagtggtgcaagtgcagaggtcctctcctgcgttagggacaactacaggaagggaggtcgcggcgagggagatgggtctccaccgccacgcccctctgctgtcccaggatgcacctctctaactccctcgctctaaagcctggtcaggatgcaccacccctcaagctcccccatcttcttcccagcagagctcattgtgtccaagggcattacgagtggtaactacattctgtgacaaatgggaataaagagaaaattctcggtaatttttctcattctaattcccggcttttcagtatgcttctgggtcctgactgattccttgctgactttaaggggaaaaaaaatgctgtccgggctttaatctaaaggagcagatgaatactgcaaattcagaaaattgctgtctttctgaggacgagcttttgcttctctgccgtgttctgtgctttgtgtcttcctaactagaaggagacaccacccggccagtgagacctgaaacagaaacccagctcagcagagtcaaaaccaacacgctcaaagtgccttaggaaggttcattacttgggaacatttttaagccgcaggaaaactcactgtcttttaagcaacagcggtctcttcagcatcttgatccaggctggataaggtacctggaggttggtgtgtgatcttagccattgcccagtgcatgcgcttcacccaaagttcatcgccttcatttctaggatggctcagtgggtagcactgaatccagaaagcttggtccttgcctctcttggtggtgaggcccatgagccatagattggctctcacatatttggaagctgagctggactctaagtgacttacaggcgtttgtgtagtgctaggtgttagtatttagacttatttacttatttagaactgctaacatatgtgtgcacgtgccacactacgaatagggcttctcccttctgttcccagacccttggtttcccttcccagaggctgtgctggttcacttcctataaacaggacaaggccaaccttcctggtctgtcttcttgggcaagcgccccgagtgctgtttgctcctgaggagttatgctcacactcgggctggaacacaagtggctacacagccaacagcacatcaagaccggtgcagaagactgctaacttcagttgttaaatctccatagcaactgggtggtctttcttctttaccgctgaagaagctgagactcagactcaggcaaacacacatacccatagccatctctcctctacgccccccagcatggaggaggaggcggagctgacttctgaatggcagctttccccacttactggtcatgggaccttgggtgggttatgactgctaggaccgtactagcacatttgcctctgagttctaagtgaaccaaatgggcacagagcacttagagccatggctagtccagagtcaacacactggtccctgtgatctgtctcagcctcacaccggtttatagccctcctccttcttccttccagcctagactgtcaatactgtggcttctctcttgggaccttgaaggagaggctgagaagagtctggacagctctggaatgagcgagatgttccctgtggatcctgctccttataggggagggggacaatggactgggtgtgtgtcctacacacatggacaggacagaagccagccatgcctcacgctatctcctgaccccttggagtgcctctttatgttctttcagtatttctcttttccctctctgtcttttcttttgaattttttcatggaaggagggaatataagttttcttgctgattatggaactttttatataagtttgtgtgtgtcctttttggttgtcaggaaatgtctgtcattaaaatatttaacagctgggcatggtggcacacgcctttattcccagcacttgggaggcagaagcaggcgaatttctgagttcgaggccagcctggtctacaaagtgagttccaggacagccagggctacacagagaaaccctttctcaaaaaaaacaatatatatatataacaactacctttatctcctaatatttttatgtcagagaaattcatccggtggaacctaagactttctgtgagtcgttaggaaggttaaatacatagataaaagccatccatttaatctttgattatttgagaaatagtcctttaatagagctattaaaaagttgtcttgaattcagaaaattttcagaattcagaagttaatatgtgtatttagttctacctgaacttacaagggaaagacagaaaatttctgccttttttttttttttttttttttggtctgagacagtctcactgtgtggctgacctggaactcactgtgtagaccagggtgacctcagactcacagaggtctgcctgcctctgcctccccagtgctgggatcaaaggtgtctgcccccacaccaggtccagagctggttattttttgaaattactgatgattgatttatgttcttgttgtacctgaagacaaacattgttttagcacaaattgcccacagctcaggaagtaaaagaattggaccagttatttagagaggtcactagaaaacagctggttttgtctcccagtcatagagattttagtaaatagcagcctcccattaggtttgcacagtactttacggcatatattttttctgcaagtgtgcgattcatttagccctctggactggctgattttgtgtgtcaacttgacacaggctggagttatcacagagaaaggagcttcagttggggaagtgcctccatgagatccagctgtaaggcattttttcaattagtgatcaaggggggagggctcattgtggatctctggtcttgggttctgtaagaaagcaagctgagcaagccaggggaagcaagccagtgaagaacatccctccatgacctctgcatcagctcctgcttcctgacctgcttgagttccagtcctgacctcctttggtgataactgcagtgtggaagtgtaagctgaataaacactttcctccccaacttgcttcttgggcctgatgttgtgtgcaggaatagaacccctgcctaagccaccctctgaagcaggcagaaccaaagttgctgatctattttacagaccacaaaatcgctttctccagtaaacacagatttgctgggtgcctcagtgatgtctgtctgctctgcagcccagggagggggaactggttggggggcttggggaaagcctcacggcaggagagagggagtcagcaggctctgggtgtgctgcctagatttcagttccaaaattaaaagcacaacttcacttacaccagaaggaggctggtcagtgtttatcagctgtgtctgtgacagaataccagagccagtcatagggagggcggggctatcctgatccagccgtagggagggcggggctatcctgatccagttgtagggagggtggggctatcctgagctagttgtagggagggcggggctatttgcatggcgggggggggggtgtcttcagagattccagcacttgcttggcctgttgctctactctcatggtgtcacagtagcacagggtgaggaagcctcctatccccatggttatcatgggcagactgccccactaagtgctcagtacagctttcctcccactaaattccacctcatcaaggctctgccacctcttaatagtccctggaatgacactaaacgttgtcatcgtttttaaccagtaaaatttgcttatgttcttatcgtctgttcacattccttgaaaaaaattaacagagaccggttcaaaaaaacgtatggagaaaatgcttctcattgactatttatcgactttttttttttccctgccgtgtatgattttgacagaaaccctgggttaggttgggaaccaagcagtccttggagacacagtaagagccaccgacagagatctctgaaagtgattgagattaagacggctaaaaggtgcctgctgctttctgatgagcgtttgaatcgttcttgattcactttgaagggaagagttaactagaaacgtggtatacgagatatggctgatagatctggaagccccaacacctctctgctctgctctctgctctcctctgcttctgcttctgctctgcttctgctcgccgtctttcacccaccgagtctcaggttcattctgagacctttccccccaagccttccttaaatgcatctgacagctccgtggtgctgggctgtgtcttctgttccccgcgccccacctgagactgatgacaaagtcttttgtccatgccatgcacaactttgtcgtcatggggacccagtgaactatctggtggccactagaaacttggagagttgggaagccagcgcaggtgcttgacgcagctccagcaaggctgagccgaatgctgtagtagccgtcattcattctctctctctctctctctctctctctctctctctctctctctctctctctctcttggggtttggtctctgtgtctttcattttgggggactttctgcattatgattcattttatgtcttttcctgagaaaattgtgtctgattctttttaggcaaattctaaagttaactttatctggccactatttggaagtcttccttatgccctggagatcattgaggacagataagcacagagctagatgaggctcttcctccaggaatcgtcttggggtatctgctcctgagctaactcaaacagtatagatggtacaggtaaacagagacaattaacaccctctgactggtcaggggaagaggttacagattcaaggcttccctttacaataacaatatttagaacaccctggaaatgtgctttaaagatggaggggggtgtcaaatagagtacatacccctggaggaatagaactcagtaattaagatggattgactaaatttttcccctgctttatagcatagatgatgaaacataatgtaaaaggaattagctattagtatttgctagtcataaaaagatagtttctgtttgtctggagcgctttcaaactgcaaacgctgccagccaaaaagcaggctgtcctccaataaatgtgtttggtttggaggagacattctttagattctttacattggagttatagggctgataataaaaataaaatctgttttgtttgtatttccttattgtgaaccttattgtgaacttataaacctgaatatgtaataaaaaaaaatcaaacacataatttgtacttcttggattaccattagtctgcctttgttctgtgaaataaacaagcaatctgattgctggttagtcagagctctgagattctttggtccatctgcacctgacttcctcccctcgccaacttctttgcgggtcagcatctagggaaggcccctggcagtttggtatgtatacaactgccattctgactgaaacagaagctacaaccgtctcagtccatcacctgtaactgtgccgtgctgttgtttgatgtggccatttctctggctgctgctttgttgtctctattgacttggcaaagctcctcgttccctttagttcttacttccccattggctagggttaaaaataagttcagggtgaagcttgctctgacaaggatgcccaggctccttcttttctaattaacccccccaccccacccccccagcctcggccaccaccagaagaccgaagttttcagtgttaatagcttagctgtccctggttaggaaagtgccataaagacaggaaacttgtgggattcattcccaagtccttgtgtttgatgccctgcctggagcttaaggaattgaacctccccgtggggacgttggagatgtgtgtgtcaaggatcagtggttgcatctaactcatcttagaatgcttctgggcttatttccacaattatcttctgcacccgacccaggcagaaagcttatcgcctatgccttccaaagtgtcatatatgtaaacgatcccaaacaagcttatctgtgatctcctcatacgctttcccttccagagctttggtgaagtgttagctattgatccctgtctttctttctgataagcctcagtccaagaggctccctgtatgtggagtccttccctgccatcagggtctcatttatcctgcatcctccctccttgctttgtgtctcctcagcatgttgccagcaggctgtgctgtgatgccttgtatttcttgtatttatttgtacatcatgtatacatttgttctctttctcttgctgttctgccgttttttcaagctgatacttattgaagctgagtctgtgttagcacacacacacacacacacagaccgcccccccccccccagctgtgctttagagccgagaggtttcatgctaattctccaagctgttgtttgtgataggtatataggttaaaagccagttttagagagggcccatgcttaagcacgtgtggctggtaactagcagagccaggtgttggatcttttgcccggggggggggggggggggaccggggacggggacggggacggggacggggacggggaccagggtctcattctggatcccaggctgctgtcaagctcacgaccctcctgggtcagccccgtgagtgctgggatcacaggcacgcactacctgcttagcttggagtttgaacactgacctagttagttgtggggatttggataggaatggcgcccgtaggctcatatatttgaatgctccattggtcaccagggaatggtgctgagtgggattaggggcgtggccttgttcgagtaggcgaggcctttgggaataggcgtggccttattggaggaaatgtttaactggggatgggctttgagttttcaaggccccaagccaggcccagtgtctttctcttttccctatacctggggttagctaccacatttgcctgcatgcctccgtgccccacgccatgagaataatctgacactgtcagcaagcctcagttcaatgctttctttttgtaagacttgctacagccacgttgtcttttcatagcaatagaacatgaactaaggcatttgtttaaatagatcatcatagttcacactttctgcttccagcagtcaccaccattccttaggagtccaccatagagagccaggcattgtggcacacgctattagtgccaacacacaaggcagaggcaggttaatctgagtttgaggacaatgtagcctacatagaaagttccaagccagacatggctacacaatgaggccttgacaagaggggttatgaacagaaggccatagagagatcttgtaacaggctttgatggacttgaagtggcattttgttttgttttgttttgttttgtttgttatttttagacaggatttcaccacctgatcctagctagcctcaaattcagagacctgcctgtcgctgcctccccagtgctaggattagctagcttgaaatgatgcatttttataatacaagtcccctggagaaacatacacacaagcaaatcaaatttaacctcacccaaaaccttttcaatcaaaataaacatgtattaacacttctagtctagacaactgttatcacattcgtttttctatgtgtctttggcatatttatatgtgtgagggtacatgagtggtgtggcatgtatgttgaggtcagaggtcaacttgcaggagtccattcgttccttctacggtgtaggtcctgaggatggaacttaggttgtcagggttggtgacaagtgcctctaccctttccgccatgttgctgctctctgtaagcatacatatttaataagggttcaacctcccccctagcccaccacccaccagagccattggaaaaggaacattaatgggaatcaggggtcgtgaacctgtttagaaactgttctttggatgattgattccagtctctgtcatcagtagcccagccctatagcaaagcaccaccaggaatcagcagtgacagtgacaggaatcagcagtgacagtccaatccattcagcagtcatcttttaagattcagcagtggcagttaaatccagaaaccttgaggctctgctaatgggccggagtccagtgaagtgtcaagaagccgcgggaacctcacacgagaagttctttgtcgagtttctccctgtgaagtcaccacaaatgtatgaagctcagcaacccaatgtaaggtgaaccgatacatgagtgtcaacagggaagactagcgaggcagagcaaagcggactggaccgaggctggagctcccgttgtctgtaaggtcatatttatatcccttctaaatgccacacatcctttcatgtgtctgctgtagccaaacagcctttcacccgtgtgccccagcaaaacatcatttgacataaatgactttccaaacaaaccagaagtttctacttcaaccccgcctccaccttttggtaatacaaagaatcaagcctttacactagaagaaccccaaggctaaatgaattctgctagcaaatcctccttcacatatccaaagttgtgcccttcttaggagtcagttctcccttctcgtttattccaattagcttattattatagttacgagctaaaattaaacagtacataaattgatggactatgactagaaaagtagagtccttagttctgctaaaataaagtcagatgcttcaggaaaatgggataagggcgaggctccaacacagtcactctggaaataggagtgggtgggataattgtcagagatttgagaagaaatattaaaagtcatgaaggattcagcattcatgtcgcttcacatgtttaaattttcatcccacgttagaagaactgagccagaaagtcgagcagaagatggaatatggatatgctttatgcagatattatagaattctaaggtctccagtgctgcgtcaaaataaaatgtccaaggcaacaggtgtttttaaattatctttctcaaaatgaatcccccactttactagcttttgaaattaagcagtttctgggcctaaatgttttaaataaaactgcttgttctatgtatagattaaaaatattatgtaacttaatatctatttttttgctcagtctttcatggacatgtttaaagccaataaatgtggatgaattttttttcttttttagtctgtactggaagttttatgccaacttgagccagctagaaccattttggaaaaggaaccttgtggtgacaaacacccttaatcccagcagtatggaggcagagggaggtggctctctgaggtcaagaccagcctgctctacagagtgagttcccggacagtcaaggctacacagagaaaccctatctcgaaaaacaaaacaaacagacaaacaaacaaacaatagaaaaagaaaactgcctccatcagattagcctgggggcaagcctgtgtgcattttcttgattgataattactgtggaagtgcccattcaacagtgggcagtgccacccctgggctccagggtcatgggctgtataagaaagcaggctgagcaggtacacttaggatcaagccagtaagcagcactgcccctatggcctctgcactgctttctaccttcaggttcctatccagtttgtgttcctgctctgacttcacccagtgatatatatatgtgtgttttcatgctgaggtacttaactacaggtgtccacagaggccggaagagggcattggatcccctggagctggagctgtaggtggtcctgcttgtctattgttgacactaattatctaattaggtcttctggaagagcagcgagtgcccctaacagctgagctgactctccagccccaggtgaatcttgtttgctcttaacctttcgagtctctccatgaagttaatacacacacagatccatgcagagattcggataagtttgtttcaaacttgcatccattgctttgaggtcaaatctgtaggagaattggcatctttgcaacactgaactctgtagttcaagctcaaggaataacttcctattatttcagtcttccttcatttacctagtgtatgttagtcctgtagttttaatgtaattcttttcaatgggtccagaatattttatgagtagcatgtgactttatttgatcaatgccctttgttttatttcactaatgtgaagtgtgtggtcatgaacattcacatttaagtagcatctgtctttttggaaaacacacatggccttggacttggaaatcagtcccacaccacacgctgtcgtcgtcattgtcctcatcgtcctccgcctcctccttctcttcctcctcctcctctgtgaactccatccttcctctgcttccttatagttaaaatagggtccactcttgtgagtctctagaatggaaatcatattcgtgtgactttccaatatgattagaaaaaatataactcatcttagtttcatcctgcatcgtttggttttgctttgttttgctttgtttttctttctttcttgagacaggaccttgtgttgcctgtgtcaccaggacccatcctgagctcgtggtcctcttgcctctgcctccccagtgctggaattacaggtgtgtgctacaatgcttgaattttgaatttttttattgaacaagttttcatttggtcaataattttcatgggatcagtatatttattcccttttcttattaacagtgtgtttttatatatcatagttaataatgtatcatatttttacagagcatagatctgtatatcagattcattagccagtattttttcattattagaataggcttattttttatgggagatggaaggagggggcatgggagagagagagagtggggagagagagagcaagagagagaatgaacacttcctaattcatgcctttggatcatttaatagtatcatatcaatagcatacctagtatgttcataactagataagctaaaaggatgatcttgagtgggaagatcattggccatagatccagaagacggttctagacatgactccatcacttttaccaccgtggtactgaatattctctttgagcctaatttcctcatctctacagttacctagactttagcccagcctctaggggctatgtgaggtcatcttttaaaatattgttagggtttggggatgtaccttgtactgactagttttatgtgtcaacttgatacaacctggagttatcacagagaaaggagcctcccttgaggaaatgcttccacgagatccagctgtaaggcattttctcaactagttatcaaccggggaggacccagccaatggtgggtggtgccatccctgggctggtagtcttgggttccataagaaagcaagctgagcaagtcaggggaagcaagccagtaaggaacatccctccatggcctctgcatcagctcctgcttcctgacctgcttgagttccagtcctgacttcctttggtgatgaacagcagggtggaagtgtaagctgaataaaccctttcctccccaacttgcttcttggtcatgatgcttgtgcaggaatagaaaccctgactaagacatgccttaattggtaaagtgcttacctggcatttattaggtccagggttcaatcctcagcactgcataaaaccagctgtggtggtaatcccagcacttgggaagtaaaggcaggagagttgggacttcaaggtcatccttggctatacactgaggccagtctgggctatatgagaccctgcctcaaaaaacaaagaataaaaaaaaaagattgcaaacagtaactgttacataatatatagagagtgctaataaatatgtcataagtgaatgtatattttactaaaattatctttcagctatcctcatttatgaaacagccttagcaaacatgtttcttgttctgtggctttgggtttacatctctttgcatgactgtttttgaaagaaatggtttattgcctttaaaaaaaaaaagtccaagctgatgttctttgctgccattcagagggtgtttgtggcttattagcgctcggggccgtgggctccatctgcggtattgacagtccttatgagcttgttagccactgttctaataaaagtcatcttgatctgtgaggaaggcacagcatggcattaaaagaatattgagttggaaatctgtattttgggcctttcattaaaatgcaccccttcacaaaggaggcagtgtggatttgcattgcaaagggtagcttatttccttctgcaacactcgaagccaagtaatttaattatgtctctgccatagccttttatcttctgcagaggaactttctctcctctgacagttcacattggaagccactcttcttatccctagaattaattaacatgcaaatacttgtcgagagacacaggaacactgctttttcaattagcttttaaatgtcactcttaatggtggtagattgtctcttttaagggaaaattaaactgctttttcctcgtgaatgctgttattgatgtgtctggtgactggcaccagtgggctctttaagtttgcacaatcagagactaactgaaccagggttggatgggatttgatgctgtaatgcagggttctctgcctcctcctgagggctgggattccaggtgtgtagcaccttacctggcctcaaaagggcgtctttggatcggacgttgccgttggaaactgatgtgctttgaaacatggacacagacacacatgggtgctgcgatttaccgtgggtgtgcattgagaaaaaaaaaaaaaaaggaacaaagcaaaacaaaaaatcaaaccgaccttagcggtatgttttgaaatcaaacctcccatggcaaattaacgtttagccttcacaaattgctattcatctatcatgttgtcaagctgtggccagtaaataattacataagatgacctttgcatacagctcagtcatcgtcaagtattttattgagccagtagattttatttatttatttatttattggacaggatccatccatctaggctcagtagtcatgggtacagcccctttaaagaagctgaagaggcagaattaagaagcatggaatgccagtgagctaagaaccatgccagggaataaataagtgcacagtgcactgagctgaacagcagtgtgtgcatacactggatttgggctccctctcccgaaaggtttctgtgtgttgctatgttgagcttagttttgcaaggtcaatggcagtatttgactgacatctccagtgcagtgagggttttcttagggtttctagtactgtggtcaaacaccatgagcaacaagcaagttgggaaggaaagggtttatttggcttacacttccagatcacagtccattactagaggaagtcaggataggaactcgagcaggcctggaacctggagccaggagctgatgcagaggccatggagggcagctgcttaccggcttgcttctcttggcttgctcatgggactcaggacccaggaccagcagcccagggatggctgggccctcccacattgatcactaatggagaaaatgccttccacctgggtctcaaggactccttttcctctctgatgactctagcttgtgtcaagttgacacacaaaaccagccattaggagttgttaaataataacaaaagagtatgtgctgcctgtagattagcaaacagggctttggggaccaaagtgttggatgagagttctgcagttagtggcagcctgtcatagagcaggcttctcggatgcttgggcttctcccatgatgacatagtgccttctgagagtgtaggctagattcaggacttggggtttaggatcaaggttgctagagatcagtgaagtcccaggaatgcctgcttcagcaccccaggtcctctttggtccatcccttctgttcttgacattcatcgtctcaaaccttcctatcagttatctacagtagggtaccatggagtgtttgagggggtgtttgcattattataaaacacacattttagattctaaacacattcttatggcagtaatccaagttacatatatatatatatatatatatatatatatatatatatataaagggggagtaggaaattaaaagcaattgtccatttccatcacaattctgatcttctttttaagaaaattaatctttttagctatggataatcaaaagcacagttatttaatggaagcagatttaatatttgccttttctgtaacccgccttcgttagattctgtaggagagctttcttggttcctccttcatgttacttcctaaccactattgtagtctatctttgtactgaacgctggttaccacagactgtgctgaagagaacattcttgagaccatctgcagatgtgtaaagcggtcatttgttgaggattttgagtgaactctgtagtcttgagtatatgtggatttcctctaggaaaacccagtttcagccatttttcagcctatgcacagtgctgtgaatggcggcttaccatggattcctctgaaaatagaatcccaaactcaaggcttgaagaaacaaagaggagaggagtggctaaaaatatgtggtggccaagatgtatgaaaatctaacttgacacaaaaatctgtgcatggtggcattattcatagtcgccaaaatgtgggggcaaacctcaggttcatcagctgttgggtggatgcacaacacggtacagaaatacagtagcaatcacatatatggacggatgttattcagcagtagagctacaatgtggattgaaagcatgatgctacatctgaagagccagtcagaagtgagcacgtatgtttttctgcagtgtccagaatggacagctctgagaaacagagagaaggtttgtggctgcttagagcagaggaggcaaagatagggacttgggaattggctgctattggcacaattggcacagtgtttcctttggggtgatggaaatgtcctaaaattagactgtggcgacagttgcccaactctgaatatataaaaacccactgaacggcatattctaaatgggaaattttatgatgtgtgaacttccaaccattgaaatgattaaagtaagtggcttcccatgcatggttagggacaaaagagtgaggatgcacacttcaccctgagcttgtgggccaggcagaagagcagtcatagccagcatggccagcagtgcgttggggacatgcattcatttgggctaatgacagccagctgcaggggagcattgtgtggcctcaaggccgtcaaggctatgttcctcagggtcagaaaagggggcagcgccccagattaatgctctgtatgtggtcaggccttcgcagacacaggaggcactcttcctgttcttccagaaggccgtaactggttcctctgctgacctagaaagaaatgcccactgtgctccagtatctggaaaagtcgggtcagagaggggaagttgagctcagctgctgagtcaaggacagggagaggaagacctaaggtcacagactgagcccggctcatcttagggaacaagtaccgtcagtttgagatttagcaattaagctcttcctacgacagtgggagtgactgtttctctggaagcgtttactcccgaacagtgtcctaagaatgttcagagggaagtcagccttttaagtggttctctgttgtgttgatgggcaacatttagctcaaggaaataggattaacttagcactgcacaccagcagttaatggagaagcaacagccctcttctccaagcccacatgtccttgtgtccggtctttcaacactgtctgcatctcttccctgacctgtgcacagattggattaaaccacaaccccccacaccctccgtttaattatgctcaagtccgaggttttgaactcagaaagaactggggtccccgtggtccatatgaaagttaattaattttaggtagctgctgctggtctaccaactgtttacttcagaagcctggggcagcacatgtgtggggtcagtgttgacccaaaagccaagtggcttgggaacaggcagaaagaagtcttttcctttgtcattcttgatttttccccccctgtgttttgttttgtttctgtttttatcttactaacttcactgaagactattcttttgagagccgaggccataactcagtggtagagcccttgctttgcatatgcagtaccctaggtccaatcccctacactacctaaaagcaagcaagcaagcaagcaaacaaacaaacgaaacccccggacaataaaaattagactttgtacttgattaggaccccctaatcacacagaaacctcagctactataaaaactgctcaataatttttcccccgatttctttgtttctttgtttctggttttattgtaaattgctaaagaaatggcaccaatgaggaaatttgataagtgatttactgtgaggaggcagagagagccttgctgggctggacgcgtggcttgagtggggtctggtgggtatttttgttttggttgctatttttagctgaagccccgtggcgggctagggagtaactacgctcggttatgttcatgacaattagaacctttcccttgaatctgtgaagtcccagtcgttgggaaaaccacactacacctccctgattgccaaagcacccccctctctgatataacttcctcacatacaataaatgaaaaatagcattttctcccaagtatatcacacaagatcatgtggattattctttctgattattagtcgaacatgaatcattacacagaaccatgcagggctttgtttgctaagtgtattttgaaagatagctagccatggcctgcagtagaattccttttggctcctgtgttagtttattgaaagtagaactcactagactcgtgaatgcaagagcaaggtgtctccaccatcttctgagttgaggataactttcatcctttgccaggctccttagagactggctgtgagcagccctgacttaacttcaaagcacagcttgtccctttgccattggcaccacagcatcttaattatgcttggacagctattattaggatagacaagtgagtaagaactttcctttgttggtttatattgctgttttgtgtgacattgtataagcttaagctcacccaattatcacaattgccacatgccaatgtacagtcattgacggagactccgagttctttcagtgtctgatggattgttttatttagttcatagaaacaaaatgtttcttgccatgccatcttcctaagccacagtctggacacaactgttctattaatgtgtttctgaccaactcagagagctgtttattgactaaatccttgggtgactgattgtaagcatggtcctggttatgactgcaaaagaagaaagttgggtataatcaactttattaacagtgatttcaggaatgtgtgcttcagagaaagagggatattttcaatgttcacatactttcaaaggaggaaaataaaaaagggcaagtccatacagcaaaaatcacagtattttagatagaaaaaaagaggggtgggggtgggggtgggggtggggagagggagctgttttaagagcaagaaactcttgttggacttggatcccaggagaacacacgttagactaaagggggaaacaaataatgaggcaagaatcagaagagtgatgtaaaccagcagccaaatagccacagagcttaaggccagacctaactgtgtctagagactatggaacccaccagaagagcacctttatgactgagtccagagtgaggggaggtggagactaaccaggctcatggctcaaggcaggtggaataacgttaacatataacagtgattgagagtgaacccagtgtatgtgataggtaatgataataacagttattacaatctattgactttctattcagggctggacacaataaaagaggatttaattatttttttctagtacccgtgacagctgtgcatggtagagattactgttatcaaccccgttttacagagagaataccaggccacgggagatttcataacaagcctgaagtttgtaaatgagaggacaacattcatattcgggtctgacctgttttagtgtctggctcttggcaggggacagtttcatacatgtatggcgtatttacaatatatgcatttgtatgcgtctgtatacaatgtattgtgatcatgttggttccttagaacccccttcccctctcttgctgaccccatctccccaattaaccctctcctactttccttttattttttggactcactggattttattagagttgcttatgttggcattggataggagttatttattggagcctaggcaacataccggggctacaccactgaaggaaatgaatgactgcctcttttgagtaagcatcccaactcttatgcctactagcaccaagctttgaaacagattgcatgtttccgtttaaattactatagtgtcaggcacataaaccaagataaacccaatagatggcattgaagagccacagcgtggagtcatagctgaaacaaggaaatggaataccatgatcctaagaaacgtacgtagctgccggctggctcacttgctcagtgctctcctacactgggcagagccctgagcgtaatctgcagcactggaaacggaccatctggatttcttcttataggtccacttgagactgtttggagccaagaattttgatagtgatccctggcaaaccagacttggtgtcagggagctgctctgtaaagctgtaagtgacggaagagatgcgtaggagacagcctatgcgttcacaaggtgtgccaacttcgattctcccaacctgtgctcctgccctcctctgttccttcctagctatttaaatggcgatcctattgttggaggatttcataggggattgcgagcaagggaattcatctgggctcagtaaggcagattcatgtttgatttagcttcttttgcggagtattgattttaaacaggttttgctgcataatattgtggttatgtcatccctctggaccatcaaaatagcaactcttgtctaaaaaggaaatacgtttctggcctggattgtttggcatttcctggtatttattggctcccacatgcctgtgaatcttctgtgtcagcattccttgtgcttatattcagaggaaggaggaagaacaagtcagtgtcacctcctgagagcagcagtgtgggcaatggtgacctctggatgacacatcacatccgttcataaactctgctagggatagtctgttccttaccatagcaaacccagtggtctgtcatttagggactcccactcttccatttttcaagatccagagtgatttggttgccttctgtctggctcctcagagtctcccatctttctgcgcagctgtcggttctcccagcatcttagaagatagctcaccttggcttggtaacttcagtgcatataaactggttaggctgatgcctatctggggtggggggggctttaaaccctgtttgtgttttatcttttgaagtaggaagaatttggcatggcatggccagtagcttaaagtgaagtaggaaagacctccttacagttttggagatttgagacgagagtatagtgtatctgttagtgttatgaagatagtgtgcatgccctggataggatatagaatacctctgccttttaagactctatgattatgaacagttccgtttcatacatacacacttgggtactgtccaaatcaaattcagggtcaggtagatggtagggtgggtaaaaaagctgcacaagacatggtgatctgtgaccccatcacccctgaggtgagatgggaggtgaggcaggagaatggatctgaagccacaggccagctcttttggaatgtgcatttcagcagccctcatgatcagcacatgtgtgctgtggcatgcatatatgaaggcatgcgtgttcctgcgcacactctaaataaataattgaaaaaccttgcaagtggaaaaccattgcattatggcgccattgttacccaagaagactgtgtcattccaagttcccaaaagtcattgctgatttgatgactcacagggaacggatggtggtttggaaatgggtctatgttagcagccctccagttttttacagatgctatgagggtatctgtggctcgggcgtaagatggttggccgtcaccactccctttattctaagtggttgtcttattattgaccactgaagaagagaagtaaaggtttagcgaaggacccgtttgcatacacgactgtgctgaggcctaaacttggcagcagtttgaattaaaatgaagtttaacctgcccatagtcaggctggaagcagtactgtaacacatgtttagtttctcaaaacaagtagcgcctctttgaaaacagcacattttctcatagcaatgcctaagttacctggagtgatgggatttgcaggattattggcaaaactgcacactgccaggagttagaactggtggtcaggaccaaagtgggatgaacggcacagttgtgtcttcagctgaaacccacagggaacagtttgtagagcgctggggatggtgagaggctagcagtatgaagtgagcccaaggcctgagaggctcctgctgctgagtgaatgtggaggatcgtgctggggtggctctcacagggcagtgaccacagcaggcaatctctgatgtcaggtccagtcttgtccctcttcctgagctgtggtccagttgtattgtaaatgtgtggtcaggtgcccggctttctttatagacctgaagtttttgaaggcagccacgaaccgactccattgcatgatcctgatctggaccgccgatgcaggatcacacgatcgcaaagttctgggggccttgcatcatggtggcccttcttccccacatcttagctttgtggtctgtgcagtggagactgtgtgcaaaaaatgcttgttgatggaaaaaacaaacaacaaacctttttcttttttgtttttctttttgttgttgttttgagacagagtctcattataaagctgtggctgtcctggaactcactatgtagactaggctggcattgaacttgaactcacagagatcctcctggctctctgcctctgcctcttaagtgctaggattaaaggtgtgcatcactatacctgactacaaactcccctctgagcccctacactctgtacttataaactctgtgaaagagggacctggccaacaccgacattggtatctggctatgtggtggtttaaagcaagcatggccccccataggcttatatgtttgaatgcttagacatcagggaatggcactaattgagagggattaggacatgtgtcctcatttgaatgagtgtggccctgttggagaaagtcactaggggtgggctttgggatttctaaaccccaagtcagctcagtgtcttcttgctcttcctgctggccgcggtcccaggtgtagaactcttagctacttctccagcatcacatctgcctagatgttgccatgcttcctgctaggataaccataaactaaacctggggaaccgtaagccatctgcaatcagacacttttctgagagttgctgtggtcatggtgtcccttgacagcagcagaacactgattaagacgggatgtgtgtgtgtgcagatgtggcagtcaggccttggccgctgactcacagacactgggatccagctgtgtgtgccatataaagcactggctgttttaatattgatattaccaacttggtctattttacctgaccttgtcaggtctttgatattatttccagttcattctaattagtagtaacctgttatcccccactctacccccagcccctgccaatctctcactttcttcatttatctcccctccccctacctgtctccttcctctctgtgatggtttgtatatgcttggccccgggagtggcactattagaaggtgtggttctgttggagtaggtgtggccttgttggagtaggttcaccactgtgggtgtgggctttaagaccctcatcctagttgcctggaagtcagtctcccactagcagccttcagatgaagacatagcactctcagcgctgcctgccctgtgcatccctagatgctcccatgttcccatcttgatgataacggactgaatctctgaacatgttgtcctttataagagttgccttggacatggtctgttcacagcactaaaaccctaagctactccctttcccccttcctcttcctccttcctgcttctgtttcccgttcctcctccccagccttctgtccgctagtctagtctatgtcagcaaactcttcatacatagcccggacattattttagacctccacccaccttcttttatagcctggattggacttctctgttcaggtgaacttcccttgtagagtttcaaaaatacctttcaaagaaccttcaaaaataatacagaaacagaaaaatagttttaaatagtactttccctttcatgaaccttttctttctgtggggaattctgtgggggagattttgagactctcttcctgcgcacatttttcagagcataccacctcatgtcaccaaaacaccgtgcattgcactggcgtgtgtgtgtgtgtgtgtgtgtgtgtgtgtgtgtgtgtgtgtgtgtgtacacgagaccaatgtcattatatgttccgtaggattaattgtaacataacattcccttagaaaagggctatctcgcctgtctgtttctgttctcacccatcgctcctacagaacgggggtgggggggggttggtggggggggggctggggcttcacacctgcctagctcaggggcatctgcctgtttatgagcagtaaatcattttttatgactcagggaagctttgtgcatttaattatccaggggaaaaactggcccctaacgtgcttgccaaagtagactcttaaagctgacctaggacaaagtcaggtaaaatgttctcttcctgtgtcgggggtattttaatttctctctcttcaataaattgtggttaaggattatttttttcccagcatagattctgaaaaatccctccctttctcacctatccagtcagcccctctgcttactggaaggttccatctttacctccacatattatgtaatgagaccttgtgctgaaagtgctgtattgaaggactgactttctcaatcagaggatagaggcagttttacagccaaaataaataagtagatggatagatagatacatacatacatacatataaataagtaagtaaataaataaataaaataacaaagtacactgaacagtacatatttcctctactttggaaaaattacaaaaaaaatttataatagttccgactgtcgtttgaaaaatgaacacactccaagcccgtctggattcattggcttaagagaggcagactgaaagtacgccatgcaccagatgatggcagaacagatcctccttaaggacatttatgacaggccaggcttttcgtttcttttcttccctgctgtctgtgtgtgtctcattactggcagtgatttctgaagcatcaggctttttccacctttgcataaagttaatcaaaggcagtctcttagtggccttgagctgttttccatgttggatcggatccttgtcatggctactctgacttctacacaaagatgcagttcacggaaaagctgtcggtgtgttgtcaagaattccttttgacagataactaggttcttttatgaaagccatcaaaggaatcagagaatcaataaatgcagggatttggtttggtgtgagttggcatcattagtgtgtgtgtgtgtgtgtgtgtgtgactgagagtgtgagtgttgtcagtgtgtatgtatatatgactgtgtgtgtgtgtgtgagtgtgtcagtgtgtgagtgagtttgtgtgtgtgagctttttgtcagtgtgtgagtatgtgtgagtgtgtgtgttgtcaatgtgtgtgtgagtttgtgtgtgagtggttcagtgtgtgtgtgggtgagtgtaagtgtgtgtgatatctaagactgggtttatatgccatggtgcatgtgtggaggtcagagcagaggacagctttgtgggtgggctctggggacagactccaggccgtcaggttaggatcttactttacagctggctttattcactcaggcatctccccagcccctcattctttcctttgagttcagatgtaggaagcagatgtttgtgatggaggagacagcttttacttgagcatgttgccctttctgttgtcacatactgacattttaatctcgtttgaacttcacagaaatcttgtgtcaggtatgaccagtttcagagcagttaagtggctgggtctcagcaccaaatgtgggtctctcagtgcccagtgggggcttcagccccattgcgaaagctaactctacctcctggggagctgctgttaagctggggtgtttggttggtatacactggtagagattcaaaaattcccaaactcatcttatattctagtaaacacacacacacattatgaattttcaaaattggttttgtagtatgagagtattcagcagcatttctgacatttccttcagaaaggagtataggaatttcataggtcttgtttccctgaatattgaagagctgagaaattaaacagtgagctgccatttgctttattggtaattgaacacactgcagctgacatcaaaaggtttctcttgtaatattttcccctgggcgtgttgagtgtcttctgcttgtcaaacgtgaaaaccattgatgggaacgcctctgctttagtttgaacttcactgtatagattttcctctttaggggaagttaggtgtcgggcattatctgtcagacagggagtgaatggtggagaggaagttgaatatctctgtctgttgttttgtagtttgggtcttgagcctatggagaggattcatatcattgagtaaaaaggtaagaaggaaagcaagttccttagaaatctgtgagaattgaatataactgtgtatcacagagaatttgaaatatgttgatgctgcatcccttgtggagatcagcttaaggcaaactgaaaatgatcacagggaatacttaaactataatcagaactcttattattaatttattgttaattagaaataagcaattaagttaatacgactaggcactaaattctaagttagaaaaaaggctcaggtatgaattcaaaagagtaacagtccagttatctttcatctaaataggagatatcagtataaatgcatgatttatattgttagacacgtccaccataaaaaagcaggaaactcagagggcatggtaaccagtagcatttagtacccgaggcacagagattagggcttctaaatggcacttctcactaggaggctttagggctccttgaagaaatggctcattctgggtctggaatgaggaccatgtgggaatagccttggggcatctcaaaactgaaaatcagcgaagaggaagctgagatggcccagccagaggcacccaggagccagcctggagggttcctggggacaaaaatggaatagtgaacattaacagaattgaaatacataaaaataagtttatgattatgtgtggtaaacaagacatggcataaaccacgcttatctattgcatttaaagtcatgaggtggcctgttatagttctgattgtgagttaaggaggaacaaggaaatctggcctccatccccactttccttgggatcctgtactttagggcaagtcccccatacaggctcgaggttaataagtgaaaggagatgctaggcataaaagacatggattggtaacaccaatgagatcaaagaggtaggtgacaacctgaaccacactgaagacattgagtgacagtggggctttatagtagaagatggcgtgacagtgctgggacccacaggtacagtgacagtacttgaacccctgggtctattgacagtatctgaacccacagatatatctacagtacatgaacgcacaggtccatcgagagtgcctgaatccataggccctttgacaattctcgaagcaacaggtccattgacagtgcttgaaccaacagatccattgacagtatttatactcacagattcatcgccagtacttggacccacagatcagttgacagttcttgagcccatagatccattgacagtacttgatccctcaaatccattgaccatatttgaacccacataaccgctgacaattcttgaaccgacagatccatcgacactaattgaaagcacaggtccattgacagtacttgaacccacatatgtactaagaatacttgaacccacagatcagttgacagttcttaaacccacagatgcattgataatacttgaaagcactgggccattgacagtacttgaatgcacaggtacactggcagtacttgacccactagttaattgatagtacttgaacccagagatccatcgacagtacttgaacctacaggtccaggtccatgttgtcaaacacaagctagtcacacacaggaatagcggcacctgtgacatgttcttacccacactcctgtttcctaacaaggctgaacttaatgtcataaacatctgtgtctaattacagtgagctctgctcagccacagcatacattccaagggcctcttctcccaccacacacacacatcggctgtgaactgttcaaagtaccaatctggcacacatgctgatttttttttcagtatatacatgtgatagtgttaaaaatttaaattaaagacggtgattagatatccagtaacaactaacagtgaaggagagcagttgacaataatacaccataataaaacttatgtaattatgtctaccttgcacagtgtcctgtagttcgtcctctctcttctcctgtgacatttttctttcctcttctgtgttcctggagatcaaatccaaggccccatgcacagtagacaagcattggatcatggggtcacctctatcactaattttcttttcttccttcacactctcagaaacagaagcttcatggttatcataaatcgtaccatcctctatacacataaaaaagtaagttgaaaacttaacttccccctgaaggatgcatgcatggcttcacttttgcattttgattctttagcttccctaatcttgcatttggggccattactaaattataaaataaaagttacaggactacaaaccatgacagtgaatcaggtgaccaatatggctccagactgatgggccagtagcacatttgtgacttgtccccaggggactgagcagtacatgagaaaactttatcttgctattcacagtcgaatgcagtttaaaacatacaaatgttgtgtctggattttccatgtaatattttcaaacttggttagctgtggacaactgctcctgataagaggggtccactgtggtagtttataggaaatacgggggacaggagatgatgtttaacaccataagatgtaaagcagtccattcctgaatatagaagttctgtgaaaacactgggttcatcacgtccacaagtaaatgttacagaagaaggtagagaagggactaagccaggcctaaggagatttattaactagttgcaagtaccagccctgtttggaacttaaatcatacagtctagctgtaagatatccttcttttaaaacaataggagaaaacggaatacagtctgtgagttattaagggatccttgataatttctttgagtgttgacaatactggaacgatccctaacagttcctatctactagctgtcttacaaatgaatccaagggctgctcaaggtgttctttagaattagtccgttatgaggtccaagacacatttgtatatgcatgaaattgtcaaccaataaacagataaggttggaaaacactccattaaaggtgaagaggtccacataaggccacagagaaaaatcagagtgcttgaatgtggtcctggtgtttggtgaggaggtcgtgaagttctttacggctcttctccaccttaccactgacgagaattgtacatgataaacacaattatcttttgctgcccgagaggcaggagtcctgtcaggaggccaggatttaactggaaagactctctgctgttcttcccactccgtctcctctctcttcacaccctcgccgtttcttcagaagccattgctgagccccacttgtgaccatttctcgcacttcccagagggaaagaagaaagcttaaaggtccagtttccgcccaccgtggaaccaccgtggcagaagcacttgactctcatcctgaaaccgtggcgacgcggtaccatgtgcccagagtctgctgccagagaggtttcctgggctgctgatgattgcgaaggggtggggaggggccttccgcacagtggcttgactctcttccaatgctctgtgctccctcaggaaggttccacctctccctacagtgcggcaggcggggggaccaggctctccacacctgccagatactgaagctcaagccgtatatccaccttcccacgtgcccacgtgccttattttacactggtttccagaagcatagagatttcatccgcttgattgttttttttaactttgtctgtggataaactttgaacagccaaataagggccaaccaagtaggacagcgtctgtgtctcttgtaggtgtccctctaactgtagagttgtgaagacctagttggaggcaggctgtgatgacagggaaatccatggcaacccctgcctcacattcataaaataataaaaccctgcaaaccaacaataacatccatttgtactcgctcctctgtggagtgtattcagtaacctttgtacttgaataaggcccgagggagaacagatgacttcagtttcttatgtgcttaaaacactttttaggaccattgtggtggtagtggtggtggtgataatgatgatgatggtggtggtggtggtaatgatggtgatgatgatacacctctacaaatgttaaaacaaacatacaaagtccccggcttcccctaggctggaatttgctttgcttcctggcaaaattatttcgtcttttgtaaaacctggggggcgcccgagggcatgtacagatctcactgtcatctgtcatgtgtcacacgctagacgtggggagcagcagtcatccatcagggtagaggagtagctcccttgctgggttcttgctgcaggctgccttctgctccacaagatttagtgagaagcgggaaaacaccgaagctcacagaaagatctgtgcccttcgggtgtctgaccgggtctgtggaaactgtacagatgttcctaacattgttgtgtccttcagaaatcaaggctctagatatagtcaagatgaatgacaaagttttattcatattcagggaccagcgagaacatatatatatatatgtatatatgtatatatatatacacatacatacatatatatgtgtatatatgtttttatgtgtgtgtgtatatatatgtgtgtgtatatatatacatatatatatatacacacacacacataaaaaatggaagaataaatatcaccgctgagcatcaagtcttatagcacaccagatgcagctgagccttgtaacgacataatcgccagtaagcccctccagtaatcccactttatagctgagctgtccagtgacttgcacagggatttacagttaggaagaggcagagctgagttctgggagccctttatctgacgccagggcctctgctttctatcccccgtgcagtgtcagggtcaacagaaggtaacagatgtgtaatccatccggtgccgatttggtctctcaccacctctgttctgtgtgaggatctccggttatttttcacatttatagctacccggaggtgaatacagggtagaagggaccgaaggcgcatacatggcagctctgcagaaccagcatagaacaccgagtgttggctgactcgatgtctagggtgaaagccacatggcctggctaccaggcaaggcaggtaaaggccatctgagtggatactcactgcagctatgaggaagaaggcacatcagacttaatcgaatggcaaagaaatgccacgtaatcatcaataccaagataaactctatcttcactcaataaggatgtatcctttaccaactcaccagaaaagcacagagactgtgtacttcaaggtcccagccttcctcaggcacaacggcatgacagtctttcctcaaaggagtgatactttgacaactatagtctcttgttctggtaatttcttaccccaataagcccaaattaaaacaagcaaacagaccacacaacccagttactataagttatatgcctagaatgggcagatctatcagtatactaacttgttcccagctatcagactccttgctacttgccatgtggttctgctccatattggcttcctcctcctcctcctcctcctcctcctcctcctcctcctcttcctccttctcctcctcttcctcctcctcctcctcctgctcctcctcctcctcctgctcctcctcctcctgctcctcctcctcctcttcttcctcctcctcctcttcttcctcctcctcctcctcctcctgctcctcctcctcctgctcctcctcctgctcctcctcttcctcctcttcctcctccttcctctctaagacctcccatctcacctttgccttccactgcccaatcacaggctctagccttatttgaccagttagaatggggagaaggttcacgtgagatcacctgatctcctcgagggcagcccctcccgaggaagcagaattaacatcataatacaaacagcaacagtgcaacccacaaccttccccctttttgttcaatacaaaggcttccttgttcagatctagattgagcacaaccataacaatcatgtaaatacagtgtatgacagtgcacttaccatccagcctaccatatttgtcctcacatattcttcagtcacatgcagaaacactggaaggagcatagtacactactctgcttctatttttagaaagatgagacctcgggctggagagatggctcagtggttaagaacactgactgttcttccagaggtcctgagttcaattcccagcaaccacatggtggctcacaatcatctgtaatgggagggatccgatgccctgtttcggtgtgtctgaagagatcaacagtatactcgcatacataaaataaataaatctttaaaagaaaaaaaaaaaaaaagaaagatgagtcctctattgaaaatatacatgcccagacacctttgaaagttattttcaattggcaaattattctgggtgctttctccatgagaaggagttttaaaatgtgtatttgttaagcttagcgttgttaggagtaatgaggctacatctcacaagtataagtgggatgtgctctgctagtcctgcaagtaactaagatgactctgttatctgattttcattttctttaacatcaaattgaaaataaaaactgtgtccactccagcaggtcctgaatgtgagtcgcccctagctataaatggcccactatgtgatctctattttcctcagcttattggttccttgactggcgggctagatctcaaagagataaggctttctgggctcaagttgctcactgcagtcacatgacttgtctgaaaccagagttctcaccgtccacggtggacttgttgttgttgttgttgttttgttttgatttatattggtcactcattgcaagccagagttatctgggaagggaaacccagattaagaaaatgcctccagccgcgcatggtggcgcacacctttaatcccagcactcgggaggcaaaggcaggaggatttctgagtttaaggccagcctggtctacaaagtgagttccaggacagccagggctatacagagaaaccctgtctcgagaaaccctgtctcgagaaacccaaaaaaaaaaaaaaaaaaaaaagaagaagaagaaagaaagaaagaaagaaagaaagaaagaaagagaaaatgcctctatcagattaacctgtgggaaagtccgtgggtcattttcttgattaatggttgatgtgggagggcccaggtgactatgggtggtgacacccctgggcaggtggtcctgggcaagccagtaagccggattcctttctgacctctgcttcagttcctgcctctaggttcctacctagagtccctgccctggcttccctcagtgatgaaagtatcctgagaaccgaaaggtgaaacgggcctttcctcctcactgtgtctcgtcacactgacggcaacctgagaaaataaggacattgttttactctcagcatcgtgtgtggagtcagaggaggcaggacatgtgaggacactgagaaccatgggaactgggccttgtcattgaccccatgagactgaagactcgctttcctgcagcctcccttcacagcggaggccacggctctccactccttccttctgtggcttccttgtatgtcagagaccacggtggccattcctttttatttttctacccagcccctgttgtccaatccctgtgtcaacagagagtgtcctttcttcccagaagtgcctcagtacttttccaggaagctgcgtgttccctccaagccgaagctgagcaatgcctggcgtggtcatttgttttcagagtcgctggcttgtcactagagtcagctagaaagtgcgaggtgcctgctcaggccaaggccagcactgctttccccagactcactgagtgtgcgcagcctcgatacagcaggccctacgctagtcagaaagaattggaaaatgggtgaggccggttacttgttggtaatttgagacagaaagaactgattggcttgggaaattatagaaaatgactaaggcacacagccaaaattaaaatatcaagtacacattttactttaaaaaaaaaaggttttaaactttaaagtataccaccagttcctagggataaggatggaggtcggtgggagggaggagggagactgagaggccagcctgagctggtcagaggagctccgtggattacctcgtgtccttgctagctcccagctggaaaacagcattggattgcccacattatgtcagatgcctcggtgaacttggctaaaactctgtatcttcagcattctagacaggaaggaattttgtaggagagatgtttatagaaaataatactgtagaaagacaaagccaagatagtccaagttattatattgtcgttgtcgtcgtcgttgttgttgttattgttatctctttcacaaatcccgtgtggggctttctaagtagagatcttacagtaaataaaagtagtcggaactgtttggaaggaacaccctgagcctgagcctgcgccgcttcctgtctcccccaccgctctgtggctctgccctctactggagttttctttgaagagtcataagcagctggagatggatgctgcccgagcgaaggatgttgtggaagctgacccaaggccacagagttgtagcccatttgaggaacactttacgactgcggctcctgtagagctcctctggttagacagtgcgcaggatccctcccaggaaccaatggcactcctgtctcctcctcatctcccagaagcaaagaggtcagctcgaagtacagctccgccaggcgtggcctaaatactgtgtgggggttcactttggctcatctggaatttcatgctaccatatcctgacttcgagtctctgcttcttggaaatagtgagggcttcacccattctttttctagttattcagaaaaatgaaatctgtggtttagttcaccaactgtcttttagtcaagagatacttgtgccagaaaaaaatcaaagtacttgaagtttgaaaaagcaatgtggtttgtcaggcttagtcactatctttaactttaccctgaccatattggctcttaggttccaaattttggctagaagtgaatttcttatgataagaatgatatcctgaatggaaagaggtcaattaacagtaattattatcagcagctcctcaaataaaaagcattgaatacattctatgtacattcatgcacacaccctcactagtcctacaaataactgatcatagctttcctcttccgccacttcctcctcctcctcctcctcctcctcctcctcccccatctctgtctttattcaacatggggatcccagctaccataggaactttttggagaggacttataaaatacaatgcttatatgaatagattttcgtcgttatggaaactaatatggaaatcctccgaaaactaaaacatgtggccccactattgggaaatgaaataggtgggttgagcagatgtctgcattcacagtgtcattctgaatagccaagagatgaaactgactttagagactgtcagatgaatggataaaggatgcacatacacacattgttaagagatgtaagccaggcacagaaagatgactgtctcatgattccgctaatatgtgaaatagagatcatagaagccagagtagaatggtggatactgggggccaggaagagggctatgctgggaagatactggtccaacgatacaaagtttctgagagacaagaggacacagcatggtgtttaatagttaacaatgcaacatttattttaaaacttcagagaacagacttcaaatgttaacaccacaaaactataagtatgtgaggtgatattcaatgaatacatttattagactatagtattttcttgtaattctattgttattttatattaataataaaaattaatattatgttatttcaaaatagaaagagagaggaaagtaatgctggtagttttttctgtctcaaggctaacttcagaaacaaatgagactttcactcagactggttgaatttcttcacttatctttgtttctctgcgttaatttgtaatagtttgagattctgataagaagtttaattttagattagaaatactcatgagaatcctaagatgctgctaaccacatgtaagttggcacagtttttcaaaacatttctcactctatgcttccctggaaaagcttagagaatagttcctatttgaagaacggactgccggaggggtagcctggtgtcacagtgaaagactcaaggggggtagcctggtgtcactcaagataaaatacagaattcagggacctgggccttagaaatcatggggagaaaaggaaagagaaacttgcagaaaggaggcgagaggatgctggaggctcctccctatttcataccatggccttggctggacctctctatgggaaggattcacatctcactgctttctgtgttaaatcatttacacccgagaattccagctaacacctgcaatgactagtttgaagagttaaatagtagaaatgagttaagtagtaaaaagttgcccaccattgatattgtctcttaggggagtttaaagttacacactagcaatttttacaatgtccactaagaattccaaggttagtagttgtagcaattgctgttttagtgactccagtagcaatattttctataaaacggttagaagttaatatatgtgagatgcctatccagttatggggcagtgttgtttaagtcattaaagcggatgcttcattattaggtatctaggtttctgctccttgcctataaacccagaagggtgggtcttgttccgtgccattgtctgtggtgcctagaatatagcacactcaggagacgaatatttattacatgcatgaacaaatgaatgagttctgtttatggttgaaggtctggaaggctgcacctgtgggcgcatctgagcagttttacccaagcctgagtttttcttcccgaagcccgcactcatctgtatgtttgactctgtgtgcagtgcgaaggtcattctgcgcttttacatagagagaagacgcgccctacgttggcattttgtcgtcgtttatttccctcatgttcaacagtcacatttcatcccggacaccagccagaggcttctcattcagcttctttgaagggcagcaacactccgcagccactagctagcatgcctctccaattgctttccaactcccagtgctcatccctctgcccagaacacaccagctccgcttgtccttgagctaagacagaacggtttcttctcaccttcccctgccgcggtcagcctgctccttcttttcccttcccttctatgtttctctttctggtttgtttgtttgtttgttttgtttgtttgtctaaagcagcctatatatttctagttcagtacgatcagttcttagaaaaccgatttcccaagcttgcatagaaaaccaaaagctatgctcaagcgtggactcgagtctaatcattgagcagcttcctgtgggatagctacaatcagagcaatgatttaaacctgacctctagctggaaataggtgcgagatgcctcactgctgtgaaacaaatcctagtacgatcttagtggggacaggcgttcctaacccttggccacatcccaggacaggtcctacttcaagaattttctgtgtagatgaggggtaaagtggaaaaagcagccacatctctgggtccagtgtatgtgatcacagcagttctagtctacttaatagatgggggcggggggagatttttctttgctttgctttctaggacttttgtcgccaaagaattaaagaattataccttaaaaactcttattgaaagctaagccaagccactgggaggatttgattgtttgtttggtttggtttggttgtctttgtttcgtttgctctctttttctgtcatagtaaagtttctgtaagtagtattcttttgcagggcataaacagaattgtggcttttgtttttgttttttcgagactgtttctctatataaccctggctgtcctggtactcactttgtagatcaggctggtcttgagctcagaaatccgcctgcctctgcctcccaagtgctgggattaaaggcgtgcaccaccacgcccggcctagatttgtgttcttgggcagcatcgtctgtgtcaaactactgcgtacacaattcatgtctttactttcagatcagtaaaatcactttccttgtcaaggttatcttcatttgtttgtttgtctttatcagatgtccttatttcctaaggcctgggacaagagggtctctttcagggtcctactcttcagatttatggttcctgtggtttctgctctattagagcctcgcccctcacaaatctcttttgtagacttggccacatctcacagagctcacactcagacctgagatcacctgatatctccctgtgctactttaccctggctgcttccacccggtgagccctccacgtacatagaagcatcaggaatcaggagaggcgtagtggctgctgttggaacatctggcatctgactctgagttataaaggaaatgactttagaaggaacatcttgatgagggaagatgatgaggccccaaaggcccggcccttggcagagctgctctgtttgagtcaaggggaaacagctatcggttgttcagagagtgaggggaactcgtgctttaataatagggaagggaggaggtgggacagagagagcatccctggacaggaagagccatgacacagctgaacgcagaggtctccaagtgtctctgaagtgtcctgtgctggtacacgctgccatggagaaactcgtgggtggggtaaatttaaaaactgtgtgtgttagcaacttgattggtaaggtacaagggacagatgatattcatgttgtaaccattctggcaggagcaaaaagatgccaaaagaaacattagtacccctccctcccttcagctatcagagtatggggacaaatgtcccccaaggaattagagccccaccctgggaatctcttgctggatggggaaagggctgagctcttggtggcagccaggaagtgactgcatgtaccttagacagcgtgacccgtgtaaagcaggccaggagttagtggttgacagaatcataccttaaccaacgatgcttagcagctaggaagctgttgagtcaggccgctgagctgttggtctcgtggctcgcctggccgtgggcattccccaccctatctggaaaaggcacgctttgtgacaagctgcaagagacatgcaaagggtacaaagaaaggtatttgactataccaggggtagatgtgtctttgtcatgccccttggtcttcctgagaaggtgagagacaacatgactcagccgtttctcaaagggaacttttgtttgctgagacttgccaagcaaagattccgtcatccctattgcacacatcctttcccagaccctttagcaccaggactgaccacctccttctggtaggagtgggcgcttcagggaatggtgatggtatcacaggcctgtttagccacagcctttgttccgtgtcctgagggcttctgagagagaactcttgaagctttcaacagccagcctcttttcctgttagaaaggttcctgggggaggcacggagatagcaagtctggtgtcagtctggaactctcctgcattagcacttaagggagagagaggctgaggtgtcgaagctgtatcggttagctgcaagtactggtttttattttacagataccatggcgttcctcagatccttcgatggtcattgttgagattgatcacttgtggaggttgatccgagcattaagttccgaggagaggctcgagttatgccctccttgcacacacaggtgcacagacaagatcattttgtcttgtcctcttcctcacatgcagactacagtacccggccatcgctgcagttcagagaaatggaggttgcctccgtgggacaggaatagaggaaactccttgaggtccatcccacaagaatctcttgcgtgccttctccctttcatgttcttcctgtggactggctgggctggaggcaacggcactcaggaccactctgagagttggcagtctccatcagcaggggtatctggttacctgcaggaggccctgtgttccagcctgcctacctacatagaactaactgctcaagagtaaggaaagagatatgttccatgtgcagcatgtgccttggcaagaacagttctctttaagagtcattccacacttcttttagctaaatatctaaaatcatccaaaaagcccccacgtaccccatcttgccaataaatagtaagtcttcattaaggagctctgtctccctggcattctgagaagcagaagccccaaattacttccagctgaaatggaaaacaagcagagcaaaacagaaacgcatctgtgtcgggcagagtaggcctcgccttaaagatgtctgtcccttaatcagcagagccgttaaacccataccgtattagcataacacgcagatatagttgagggcattgctgttgctatggaagattgtcccgggtcatccggatgtactcgaacgcatcacaaggaaaagccggagagggaagcagaaggcgagtcacagagatgtgataggaaaattcaactcggtatcgcccacttggaaggggccctgaacccagggacacaggcagtctccagaggccagaaaagaacaagcccagggaatctccatagagcctaaaaggaacaccatcagctgatgacttagctgactcagcgagtctcatgtcaggtttttgacccacaggactgtcaaataataaaatcgtattctttggggctgtctgtggctgatagttatggcagcaatagaaaatggtattccactcacataagatacttttaaaaaaatgtttgaagtttatctgtgatgcggagatgtttgaagtttatctgtgatgtagagacaacagcaagccttactggttgattccagatatctggaggtcggaatcacactgccaggcccatctcagagctttaagtccccccctcagcgctctggcatgtgcacacagatgatgtgagttccagaggaactaaagcatcccccacgtctctggaggacaacgctgtttagccctgggtggccacctcatcaggactagccactaatactgtggtcaggcccttgggcaagcagcacagttaagatttcgtttccttctaaatcctcctcctcctctactgttgaaatgtggctagctgcttcatctcgcaattagagtgtcattcctctaattcacaccaaacaaaacagttggaaaatataaccgcatggcccagtcaggggaaggaggagatgggagagatccaacagttaggaacccactgggctgaaggagagggccctaggcgcagctctcccccagcttgcccatggggtgtgcttggtctttccttatcacaggatgctctctgtgtgctgtatggtggtggtaagcccctgctctcaagggttcacagaacgaatggcttaggactctgatgaattcataggttatttatgagtggagagccagatgtctctgagtattcactattctcagagtaaattaatagcattttccttgctgtggttatagtacaattggaaagatcaaatgcgcatgtctttctataattgttgacgtttcttcccttcttgcgcacaggaatcctagagtagagatcagccttatgctgagtcaggcaccaagaaatattgctgagtcatttgtttaaatagaggggaggaagttcttactgtaacaagaaataaagtataataatcactatagaaattactccaaagggagcatatatattgttacttatttttacttaaggtcacttatttattggactttaccttatttcataatcattttttgttgttgtttctgatttctttagctacttctcagagcctgttacttgaacatttctcccacccagtttattgagtcagtgggaaaaaaaaagataggactttatataaaaataaatatgtaaatagaaacaaagcaaaaactagctaatgtaaaaaaaaaaaaaaagcacagttgttgcatgaaactggaaagtgcaactatgtcccagtgtttgctattcataacttgtaccccaggggccacagcctgcttcctggccatgaaactgtgtagtgagtgccttggtgatacgtctgtcagagggaaagtggggcatggatcatgacgtcagcgctgcatcacagatcttgcagagacagtcagggcaaagcacagcaggtcccatagggatgtatgacaccacagcctgctaaggaaagagcaattcgtaagtgactttcctttaatgttggctgtggcaactgctggtcatgagctgactaggtcaatggaattttcctgcttaaagaagtttcctagtacacatttttttatttccaggggctgaatatgtcagttcccagcagacaggtgtagcttgcctttgtagagacaaacagcagacttccatgtggtcactgtgtgttccaagtatctgctgctcagcaagcgagttgcttttctcctctctgcctctctggagtgtaatgctcttcacaaatgtctgctctagatgcttctgaaaggatgctttaaaaataggcacctcctggccttttaaatttggtatcgaaacagtaagagaaaacatgacacacttcacaaacggaaataggctgaaatttgtatgtggaataaattttccatgacatgatttgataaaataagtattgataaccttactcagtatcgtgttaaatctaaaacaaaacaataaaaacttacctgtagtatttataaaactcatccctgcccctaccaaaagaataaaaaagtctggtggctccagaaaacatggcagctgccttaaaagtaaccatgccacattttgttatgacccagggcttcccagttctggcccgctcctctcttgagcgactttgcaggtgggattaaaacagacagaaggacctgtggcttcccctaaacctactagcgtacctcgccatagaagagtttgaaatacttgaggaaggactttgcttctgtggaatgagagagtgttcatgcctaaaatactcaacctgttttggaaagaagtgcatacccagctgaggatgtagcggccatttttatattgccctcctgatcctgtctctttggaaagtccatctgaagacaactgtgatcggtcacagacctgatgtatggatcagctttgtgcgatgctaatgagggcaccaaatcacagaagggcgctgtctggtctgggtgtggacaggtggcccagcagtgaagggcacttgctgccttttccagcacccacttccagggcgcccataactgctgataaactgagctgcaggggatccgactccctctttcagtctctgtaggcatcggcacacatacacacaaataaaaataacaaagataaatctttaaaaatcgcgacttcacagctttacgggttcaagttcgaatggaataagagctgctctcctgcccccagctgacattcacggcacaggaagaatagcaataataggcatgcgtactaggaccaagaggttacacctctagccacaaggagagaaggcactgggtgggccaaagctctgtcccttgaactttgtaaggtcacctcctcatggaaccaagaacgtcccactggaccccacctagagagggaacagggacactccgattggatgtggtgcttatctgcaacggaagaggtgtgggtacctgctccactgcagccgggtcagagcactcatggctttactccaccccccccacccccccacccccagattccttaagatgctggatcatgaaacaaggaaccaaggttatgatgcaagacacatgtggtacgtctactacacgctaggcactgttctaggtgctaaaggacctctatacatgtgatctaaacacagggtagaaaccaaggctatggtaaagaccaccagagtgctggcaccgagatgctgctccagcaggtcagacacggcttcttagaggaagtagcatttaagctgagactaaaaagtcacactaaaaacaaataaagaagaattggcacatttgtcagatacaagtgtttattgtatggccgttatgtgataggcactgctgaggtccttgatcgactccgggaaagcagagaaagatctttgcatggctattgactgcctaattggtagaaggtgatgatgctcaaagagtgtgtgtgtgtgtgtgtgtgctcgtggtgatgatgacacaggaattatgagatagtacgttatgtaatatgttcagaggaatgtaaagtgtcatgtaaagaaagagaaagtgtatagcaggagtgtggtttcagttagaggggtgtcagataacctctgagcagacacttggaggagttacctgtatgcatcagctgtgaaagggagccagcacaaagtccctcagttggaacatgactgacatgtgtctaaagaacaagaatgtgacccgtgtttagacaagaagccaaaaacatcactgaaggtcagatctcctgggtctcataagccactgggagcattctgtattttctctctaaatacaatgagtatgtgttgggggaactcctatggggttctgaggcaaggggtgacatgatgcagcttgagtattaataggctcactgggctgccctgtggagagcagctgtcagggactcgagtcaaagacggagcgacccaggtgtgagatgagcgaggcgctgagaagaaatggcctctccctgtgtactctccacagcccacgctctgccttcacttccctcagccctatgtctttcacgcagcctttatttttccagcattgttctagggacaactcaggcaccatactccagtgtccatgataccctgccttatcaaccacaactgccgtgctctctatgacagttgatgggctggctgataatgatgggagagaagccaggaagcatggcactgtgggaaatacagcctgtgcaatgaacggagcaataaacgtctctggtaaaaatatctatgtctgtgttcttattatagaggataaattagcagagccaacccagatttgatgttggttgcggaaatgtctgaggttctgaggtctctgaaatcttaccttaggctgctactctctgcatctctgataatgacacagcagagagctacacactgttctcaaatggaatagagtttccccagcaaaagtgttagtcaccacacagtttcaatattatgttgaaatacaaagaaaaggaaggaaggaaggaaggaaggaaggaaggaaggaaggaaggaaggaaggaaagaaggaaagggaaagagaatgcttggggcttggagagaggactcagggcttagcccttgtatctattgccaaggactggtgttcaattctcagcactcctttggtggctcacaaccacccatagctccagttccagggaatcccatgccctcttctgaacgccacaggtaccatgtgtctgtgaaattttatatgtatgtatgtatgtatgtatgcatgcatgcatgtatgtatgtattcatacaggtaaaaagttcattcacataaaatgaaaaattgttttaaaacagaaaaaatcaattcctggagatccagagaaccatgagtataaatcacggtataacagatagatggcttgagaaatgccttcggaaaagcagatatttacattacagtgatcacgcttgcttttcttatttggtgttgtacaggaagttattgattgaaacctgtagggatactgtttccccagtgtttagaatgttagaaactttaatgtttctctgaaatatttgagttggaatcaataaaattgggtctttcaacttcaagcttcactatgacccctttggcatgaatgtgatattttttatcttctaaaagtatatagtcctgaccagataaaatttatgtagtgaagctttttgctttgtggccgtatgggatacgtgtaatagctacggcctccattcttccttcagagatgccagagcatcattgtaaattaaggcccaagatccagtggtgcaaccctctgtagcagcccagactcctaagagccacatggtgaacacagccagagtctctgggagggtatggggagggggagtcagaactgtctaaggataaggtgctgcctcctagctgggtcccggtcatcagcagatcctatgccagggacagagaggccacgggcattgcttgagggccacactactgctgcctttactgtcttgagcttctgatgcgtgtgctagctagagtgcactataggttgtttattcctcttccatctaagtcactttccctagacagctcagtcttagtggtagaatcagggcaggacctgaggactttcatagtctgggttatctatcaagaatacagataaaggagtcgttacgtttccatcggcatggagacaagttgagaggaagggacaagattggcgaataaggaacggggtgcattgaggttgaatgcccacgtgcctacctgccaatgaagggctgtgtgtagttcattttcaccttcactgaaaagaggaagaaagatacaaagacaataccaatccaaacatgccacccattctctactgagtaataaatcagtgggcgagcacttgcctagcacgcaaaaggtcctgggttcaatcttagcccagtatagtggtttacacccaatactctggaaactgatggaagagtattgccacaagttcaaagccagcctgggttgcatagtggtttcttggctagctagggctacataatgagattctatctgaaatcaaacaacatcaatgattcaaaaaaaaaaaaatccttgctgtaattatgtgacagtagtgagggcaaagaccacatcttcttgtggcagccaaagatacacatcctatcctataacctcctgggccaacagtggaatgaaagctgtccaagccccttaaagcaatggctgtcagcaaagggctttgcttctaggctgtccaaattgctatgtaacgtaagccttctaaattaccctcacccaacttgccacgatgctgaacattgctttcgggtaagcttcgtaagccacctcttgaaatagggacgctctgtgcttctttgaaagctggtgtgactaacatagcagaaacactgcgagaagagaggatgggagcgaaccaatgtgctttagagatgcagaattgcgagggggaccttcaatgaacacaatattgctgacccatgaatcatgacagggcagatttactctgccttaggatggcagagagtccatagtatgctcgaagccatacgaagtgttaggggtagccttatacagtaatgggcctaaattggccatcctcacccaatccaatggctgcctttgtgtcctgcccaactcctgaactgtgttgtgaaggtttgttaagcaaggaacagctgtgcggggttcagaataaagacagtctgagaccatacctcaaagggataatgtcgaactttgttgtctccaactagaatatttttctaagtgactacgtgctatataggtttgaatttttggctccatttttttctttcttttcttttttattttatttttctcagtgctaggagtagaatccaaggccagtagacctgcagtgaactgatgggccagagctggggggttgggagaagggtgatacctagacggggactcccccttctcagaggagaaggggagggaggtatagagagggggagttttgcatgagggggttccaggaggatagggggagatgatattgggatgtaaagtgaataaataaatagtccaaggccaagaatagagtccaattctgccttctaggcactgagttaaagccccagcccagtgaacaagggctcctctgttactgatgccagaataaagatgccagtggctctcttctttgacctcccatctgctgacatagttttaaggaagccctagattcataagcctgttccatagacttttatttagagagacaatcctggttcgacttaagatttctggactttctgatggtgcaaaatgcaatacctgttgagtagagactgttcatattttgaactcagctctttccctggtccagcgatattgttcaaatggtctctggcagtttctggcgatggcagcagcaagcgcagctcacagctagccacagtcacaggaggaaactgactgaccctctgtgagtagcaggttgctgagctggcacgttccgtgtgttagtgctattcagtgccttctttgctgacagtggctttaagttaggatgtatttatcaggatatagctccagtaatgcaggcccatatgtaaatcaataaatgtagcttatggagtgatgaggcaaagtttagttgttagtaggctgcctttgcctacagctgtagttatatcgaggtgtggctgcctctgatcccagataccttccagacccacggtgccttgcaaaccttactctgggcttctagcccggggagaggagaagggtgacttagggaaggaagaaaagtaatgggattcaaaataaaagacatttccttgctacttttgttgttaatccatgcagccaaggttggagtggtttagaggggctgggtagtgcagctggacaacctccagccttacagccggtcccccagagggtggagcaccgtcttagtttttacagtactgtgtggcctgaggctagtttcctgacaccttagaccctcagatttttttttttcacccaagaggcaagcataaaatgacacacaccgaggactgccataagattcagcaaaggaggaggcatgggagccacctggggagtttagcagtttcctactgagctagacatagcttatactttgtgaccccaagtgctccctaccctttactcaaatgctaaaagcatatggccacacaaacactgacacgagaatgcctatagtagctttattcacagttgcccagacttggaagcagctgagacacttcagtaactgcgtggaagaaaccattgtacgtctatattatggtagactgtttattcggcaataacagaaacgagctggcaatccatgaaaggacatggaggatattgatgaaagcacatgattggtacaagaagccagcctgaaagggctacctgcggtgacccccaactgatcgactcttgagctgactcttcattgctgtgacgataccagaaagcagggtgaaagttcagggaagcgggttccctggatcccaacttcccatggttggttgtcaccattgctttgagtctaaggcaaggctgaagcattgtggtgggcggtgtgagcgtggggcagaggttgcttacttcatggtatctaggaagggacagacacatccttatttcctcccgtcagtgcactgagccatgaagtcagagctcagagaacccaatcacttcccccgaactccctatttctgatctctgctatgtgaagtgaacagtgagatgctcaacatgtgagccccctggaggctcacccttacatgcagacagaactgtggcattctgggaaaagcaaaacaatagaaataattaaaaggctaacgtttgcccagtgttcaggaagggggatagagggtgcctaggtgaaaccctggatatgtagagcagagaagccattccgtgtgacactgtaatagatccagggcactgtttgtgtccgaacctacattgcacagcacagagaacatgcctttacatgatctgcggatcttaataaacaagcctgctttctgaaagattaaataggctaagcatagataggacagacctaactccctagcacacagtggtggtgggaccatctatgagcatagtttctatttgtgttaccaaaaatggcaccactgcacaatgagagataaccaccctttacggccagagatgggctcaaaggggcgtaatgttctctcactggccaagttaatgataatctgtggcccaaaccaaggaaagcaaactagcttgtgcaggaattttggatttgtagacactgtgatttgtagctggtgtgaagtctgggtctggacttggttagtcaccgtgcacttgcaaaagactgcatcttgagttgatctttcccagatccagtactgttatgtaaaaaactcactttaatcaagaaacgggtccaatacagtatccttatttgtctgcttgaagtttctcctcttttgttttagagggcctttgtgaatgatgcctggttttgttttgttttgttttttggtttgtgtgtgtgtgtgtgtgtgtgtgtgtgtgtgtgtgtgcgtttgttattggtatttttattttggcatggcttaaattaatttgggaagaaaagataggtattatgaatgtgaatgaaatgctaaattatgggagagttctaaagccttaaaatggtacacagaaaacctcgccagcacctaatggatggaaagggttaaatagttacataaaaagcaacctattttataactgcaacccttctgcgccaaagttcccttctccctgaaaagctaagaaacttcccaaagtgaccccatcaacaaaacctcgcatctgctgcagcactgtggaaggtgtcaagagcctacaataagtagactttgaatttacagcgcacttactatatacgtaaagtaatgcaaatgttacattctccaccttcttgcttggtagcttctcttagctcatttcagaaacgggattataagcaatcagaagacactgggccagacacttcctctttcttctatggtatacacactgtctgtgtgtggatgtgtgcatgtgtgtaggtcaggggacaccttagaagttggctctctcctaacaacatgggggtcctaggtattgaactcagatcgcctggctgggtggcaggcgcctttacccactaagaacctcctttatacattagtgcctgtacgttctcacccatccacatcgtgcatgcctctgggaattctaatgcctgcttctctttcttttctttctctttctttctttctttctttctttctttctttctttctttctttctttctttctttctttctttctttctctctctctctctctctctcttccttccttccttctctctctcccttccttccttctctctctcccttcccttccccttcccttccccttccccttccccttcccccttccccttccccctaccaccatccaccaacgcacgccgcagccaaatacaagcaaaacgaaggaagaaacgaaacacaaacgaggaacccgaaaacagatgaaactcggaggcaacacgccaacaatgtgaacgccaagaatcacaatacgaactctactaagaaacaacctaactcagcgaacaacgatccaacaatacggcagaagcaatcaatccaaggaaccacacataaaatggaacgtaacaaagacggattaatcaacaaaaagacacaaagcgacccgaaagggtctcagaacccgaactactcaactatgagaagatgaccaaacccaccatagatttattgcagaccgacaaccaggcgacagaaccacatcggatgatcagccataacaaaacacggatgagctaagtgcatacggaataccacggaaacaattcgcaaacgacggccttcagatgacgaggaaagcggaacaccactaccgaacctggcgtctatgagaaattgacgagcactggcatcgataaaaggatcaggatacgatctcacctagaaccgacatcaaccagcctaccttaacggaccaaccaatggcaaaaaggggtggagcgaaatctaatacggtcgcgcaacacgcataagcgcagagtaaaccgcgccacagtccgcacgtgaacgccgaccagagcgcaaaataaattgattcagcaactgaacgactatcaaatacaatacaaaacacgtatccgagacgagaccagcaacgatcagatcagcgcacaagagcgactgacaccgatacgaccaacgctagacaacgtatgcgctcaaacagtacgcgacgaaataaccagcaccgtgtgacgatgtgagactccatagatccggattatgcaccgaccttaacgcgcaatagacgatgtccgaactacttgactggatcacgactgggtgactcacccacacatatctcacacgagcacagacagtacgcacatgacactagacgtgcacagctcagtatacatctaactgtgctgagctctcgatctaactatacgcacctactcagacagatcgacgnnnnnnnnnnnnnnnnnnnncttcccccttcccccttctctctctctctctctctctctctctctctctctctctctctctttcttgctttcttgctttcttgctttattttaatgtctgacctctgtcactattctgagttgagttttctggctcatccacagtgtgatgcatgaagatcccaaatccaagaaaccctcagtggtccaagtgccagcagagaggctcccatcccaagatggcattgaactggggtcctcggatgttaaggaatcattggcctgaggaggatgtgtatctgagcagtgtagggggacaagacgagcttagagtggcccaggcaaagtagagaaggtgttaagagtctgggacagatgggtggccaggccagccagaaccttccttttctccagatgctgttatcccaggagaggagcctactggaaccagaggaggttgctctccaacaaaacacaaattgaggggtaaggagacagtgaagggcaagtgagggcagcggaattggttgtcatagcctggtggcctgaagaggtttctctgcggctggctgagtccatgttggggctgtgccaggcatgaagtgcaagccaggcttcagtcctggctgtagacatattgttctccctgtcatttagacgggatccaatttctctgcttgagcaaattgttcctgctaaggatgcagactctgctaagggccaaggcctccgtggagttgacccgacctcgcagtctgaagcgaacaatattgggggaagagtgatgactagattctctgatgcccctgaaatacagaggggtcaaatgggtccattgtgactgtaatataacttgtttgggataatctgagcatacttccctgtgtcctcaggactcccaggatcctgatcctacaagacagggatgtgaggaggaacattagcagggaggagtgtgaagaaagatctgctaggaaggagtgcatacagaggatgggatgaggaccagaagccacccgctgacagcagtgttcccgggcatctggcagagagcagcctcccagcccctggggaactgaagagaagacaggagcagatacagaggggagccctgctacacagtacccccaaatgcagtgggacccaaaaattgatgtgagaggtggctgacttctgaacagcctcacaaggtcatagggcacaccaaataaggcgccttccagttttgatgctgtgatgtagagacggcaccggcaaagagctgcaacaagaaggaacaattagccaattcattacgttgacatttctggccacaaggtcagtactttacaaaatagggccctttcccttaattggggttgtgacagataaacgtgtgttcccatctgactcacggtgtccatgtggccaggccctattatccccacttggcctgccctgtctgtgtaagagggcttgttctgtgtaccactcttggcatctctgtaaaggattcaaacggagtcaacacagggcctgcttcctgttcttcagccagaagagaagactcattcacatacagacggagagccggcaaaccttgctggatcaagagtggaggaaaatagagggaatgggagaggggtcatttaaaaaccacagttcacatgaggaaaaccttaacaagaactctggataccagttcaaatgaggagcagggatattcagaatgaaagcaggaggctaaaaggctccacagacatcacctgagatgctcggagaggcagcaggaggcagtgtgtgacatttcaaagcacatctaaggggccaggttgcctgggttccacttctggctggttcacttcaggcagtctgaccttggcgagttcctgcccactgtgctttagttttttgcttagcagagtgacgataccttggtgccttcctttagatcttctatgagaattgagcagtgatggttagctgtaaatgccagcccgggaccctaaaatcacctgggaagagagtcccaatgaggaatcattttgagcaggtcggcccgtgggaaatgtctatgacgggttatctcaattgtgcttattaatgtaggaagacccagcctgatagcgagaagcacacttgcctggcttagacctacctaggctgtgtaagagcagagaaagctagcagagcaccagacacgcatggcgttctctctctccgcgcttggctgttgatgtgatacgatggatgagtctcttcaagttctgaccagtaacttccctgcagtgatgggttatcatggatggagaacaaaagcaaacccttcctctcgcgcggttcttttagccgggatatcttaccgcacagcagaattgaaagtcggataagcaagtgaagccgagacagagagatgtctggcaaggaaagcaatgcctttcttcctgtgtatagggaggtagatgtgggctatcccaggcaaccaaagaagagccgctgctgaaaaaccgatctcagcacacagcataacgccttttgtaattggtttccccgaaaagtacttttgaaaagtaacgggccaagaaaacggcggaattagctggattatttgtagcccagacccccgtgggctctgcctttctagccgtgtggttcacactttgacttttgcatcccctgggcatctcccacctgacacattcaaacatacctctcagtgtcactcctacgtgccgctcctgcatgcagccttctctgggttattaccacatgtgtttgagtacacatgtgtatggtgcatgtgtgtgtgtgtgtgtgtgtgtgtgtgtgtgtgtgtgtgtgtgtgtgccactctgcgcatatgaaagtcagggaacagcttcagtccttctattgtgggtgggattgaacacagatcatccaatttgcccagatagcacttttttacttgctgagccatcccattggcccagccttctccatttcagttccagcagtgggaatagcagttacccagttactcaaactagaagctgggcagcccgagactcctcttgtcttggccagcatttaacccatcagcctatgtccatttcctctcggtatcttcacacccaatctacttttctgtatagctcctgcccccatcttgggtcaacagtcaattttcccctgaagtgactttctaactgtccctctggctctattcttgcctgactcaaggccagaaagcctgcaaggagccacggagtaggaaaccaacatccatccctaaagaggttctcagccccgggtccaagtgcaatgctctgtgcaggcatccttgggctttgctggttcagccgcatgcactggcatcccctttccagcttactctcccagttacagacagaatcgtgtttgccacctagaaactgggccatgcctcttgttccagtctgaccctcatcgctggtcttctgaagttttctgtgcccttgagctccaaagcagatcccagcctcatcctgtctgcagttccgtgccgtgtcttttctggctccgttcattatcaaatcgacattaatcagggcagcagttttgctttgaaaacatgctctggagcagatcacagaatgtaagctcccaaagaaagctcagagacatggcttagtgccgaggccacagattgaacccttgggctgcagcgagtctgtacacaacattttgcttggcttacatagcatacttaaatgtgtgtgagtttgtttgtttttttttttaattcattgacattatgtaaaactaagagattttagccaatgatggaagtgcatgcccattatcctggcacttgggaggtagaggcaggaagatgtgatcgtaaccagctttggtatataggaaggccaaggccagttatgtgaagctctatctcaaacaaaacaaaacaaatcaaacaacccaaacaaacaaaaccctaagcataaccaaacacacacaaaatccagagagattttttttttcctaaagtacaaatctgtggctttcttctcaaagatgcaatgtggagatattggaagtctctcgaggggctacagttagctcctcgcaagcagcaactgaccctaagtgagacatgtccttacgggttcccctcagtccatgtggatccacatttacactagtttatactctttactactccattggagatatttgcacttgcagtttttggagctcgttcaactcttacattttacagacgtgaaaggtgagcccggaaggtgtcacgcccatccctcggtcatgtctcctaactcctgagtctcttatctctgtattgaacacaatatgcagcttggtttgatagtctccccactgcacctgccagctaacatgccctccagttgttcttgtttgtatttgtagccccatggaacctagaccctatgctctggaaggtcaagatgacattctaagaatgcactacccttactttgtagaagactatcgcccaagtacacagggtgacaaaacgggaggattaaatgggacagacaaggtaaatctggactccagactcctcctgtggtactggaggaaggtaggggagagagcttggttgttctcatcctattgacatgcacttgaatatatagacagctaggagtcagtgaaagaagggtgaagttttggcatctgtaccaatattgttatccctttccccagtacaattactgtggactgtgccattgctaagcaaaaggaaaacttgaaattttcgttaatgaacaatggccctggccaatcaaaaggagttgagagacctgtgtcgcagaccctagaatcttatgaaaacttcctcctgggtcctttagtgaaggagactacattcacccttgaggaagctaacctcaatgactacgggaccctcctagctactgagtcattttgtgtcccatggaatcatcactatgcctctaaagtacagatgcattgattattttcctgccgctgggatgaaacacactgatcaaaagcaactttagaaggaacgggttaattttggtttgtagtttcagagggttagagcccatcatgccaggttatacaacagaaacaggaagccagaaagtcacaggcgtacacatacacaggaagtagagagtgacttaagtggggtataccctcagggccctcccccagtgacccacttcctctggcaaggttccacctcctaaatgctctataacctcccccaaacagtgtcaccgactggtgaccaaccgttaacccatgtgcctatgtgagatatctctctcagtgaagccaccatacaagcttaccccatgtcatgattgactctagactttatctgccctggcaaccataagcttctgtataagctgcagggaggcgggacatctgtgaggaagaaaggcatgataggacaggttacaaaagaaaaacaatgggtggatggatacatgacaggcattcgccctctggggtctgttttattagaccgttctcctcttccttgaccattggaaacctgaaatgcctggtgatgctaaatggcacctcctttcttggtatttaagggtatccaagacctcctgagtcatagtctctctagcgattaagtaaatgtgactagactatgtatcaacgagagaattgtgggatcagggagcaaggtaggtgagtgggcaaagcacttcccattgcagccatgagcacctgagcgtcacgcctagaacccagattaaagagctggctgtgatggtgtgtgctcatagtcagtccttacacagggcgggtgcaggcaggcagattcctagggcttaccggctacccagccttacctaattggtgaatcccaggctaatgagagaccctgtctcaaaaccaaggtggacaggacctgaggaacaatgcatgaagttgtcctgtggcctgcataaactcatgcatgtacacacacatgcacttgtgtgcacacatatacatccgcgcactcatgcatgcatgcatacacacacttgcatgcacacacatacaggcacacaagcatatgggacaaggaaggagaggggagcaagaagaaggagagaaatatgttgttcaggagcaggcatggatgtagaatcaaatcctctttcaaacttgtgagtcattgctcagaaatgacagtccgatttatgatgcagggatgtcatctcctgctgacagtcaactaatgagggtggtgatttatgctacgaaagggacttgtatgactaggctcacattgttgctatgaatttctgggatcctggggacctttatctgttttccactttaaaaaggataccaaaaaagtatgcagtcagccagtaactcatgccatcctctcgcactccttacccacagacagacaataataacttttttaattgcttctgctaatgcatttaattgcttggatcagtggagatacaaaccacttttttttcttcttcttcttcaaagaattatctgccactgaattatttcagccaaagagtgttggctcctattaatccctctgcagctcaggctttgtttgtttgtttggagtgtgaatccattgctgctctgggctctccctatccttttagaaatgagggctcttcccttgtaaggctatggctcatgcagaagtggccataatgactgagccaagagtagaggaagactccaaggggctcatggaggtggggtgggcagtagggagtagttggaggtcggagaagaagagctttcagaatagactcactccaagagctcacgttggaaaaaggcagcagcaggctcggggccgttgtcaagcaccgcactggagcgcccacagtcagagcagcttgagaacgactgtagtcacagcaaaactgtggaggacactgtgacccaagctgacacagtcatgaaataggtggcatttcccccactgagtggaaagttgcttttcaccgtgttccaaaacactggctcaattgtgtgcgtgcttggttgtgtttgtgatactcggcatcgctgtttcctggaaaccctccctggagtccatggccatattcactctcgtcccccagcccccagcccttcctccccccacgctcacccccacttcacctctgggctgcagtcaggacacgcccctttctcatgcttccagcgattgattgtgcagaacatgaaaccaaaagcagatgggacaaatgtagatcggctgttgttctccatctctgtaatttcctaagtctgatagcgtgttaatctcctaaccatacaagctgcttctgtgctccttgggacgtctacacagaaatattgccaggaaacacactaaaagaatatgacgggattttccattttgtttctcccttctcctcctcttcatcctcctcctcctcttcctttttaccttcttcaagtaccatgctgttggagcaggaaattaaatgcactactttgaagtttgtacttttcagagtttctgttaactgatctctgtggatctgaccatgcttcccaactcacagtggggttacatcttggcaaagccaatctaacctgaaaatatcctaggtcacaaatgcatttcaatgtacctaccctattgagcactgtagctcagaagcacaataagagggttgggtatctctggggttgggtagtatggccggtagctagctggccaggagctgcagcctacagccgctgcccagcctctcaagagaaaaacatacgacagataccaagaaaaggtccaaaccctaaatctgaaatatactttctactgaatagatctcattctgcttcattatcaggtgagggaacctcagaagccaggggccatcggtgtgacatcaacaccgaaggatgatggtttggatgatgtaatagctaaatccaagatccagcccctggcgaatggtcttcctaaaagcagtcactctagaagtagagtatttgtttaccaaacagaggttgtgttggctgggtccacatcttatgcagacggggaatgccactgaccggtagaggatagaagatgctatggaacgagtggagcatgctgggaagagggtatggagcattatagtgtctctttagacccactcctctcttggtcagtcactggtcacattgcctctccaaacagatattaccaggcatgccttcacaaggggcttatcctaaatcaatcctgaaaaaaaaaaattcaggtttctgttgtcatctgtgaaagtgtagctacccctgcccagtctcacaggacctatagaatcctgtttctctggaggaatctatagctgcatgaattaaggaagtatataaggatcatcttgtccctccaggtcacataatgttctgcccagaggattcaggttgatggctcagtgggagtgtccgagaagcttcacaattagagaattgcagtcagactagtctgaaatgacttcctggtcatattctcattctctcactctctctcactctccctccctctccccctctcccccctctccctctccccctctnnnnnnnnnnnnnnnnnnnnccctccctccccctccctctttctccctctctctccccttccctctctctctctctcttgggatttgttgactacattcacctcatcagcatcttagcaggctatctgaaagaacccagaccttcagccagacagaactggatttaaatcagtctcagtctcagacacttactagttagtgtttgggacatgtcattcagtgtcccctaatactacaacctcctttttttgagtcgatgctacccatcttgtggtagtgactcggaaggcacaagtatttccttgtctcctccaatccttgttttcaaatgatacaaacagagaacacgcttgtgtcagacctctctggaacccgaaggcactgtactaggaaatgttcctaagcctggagcacagcagttgctttattagtcatacaggcatgaaggaaattacttcatcttgctttccttccgttatctacccagtagctaggagggacatgtggggctggctagcctaggataagaggagacagtgctgggccataaggacctgtttcacacagctctttctcaaccccatcctgggagcagaaaaggccacagtaccagacagaatgaccagtgctaggatgccagggatcccaaccacagaggaggaggaggaagaggaggaaaggaggaggagaagaagaggaggaggaggaagcggtggcttatcagtaccgagttgggcatatcagtactaagttccctctgctttctcctgcccgcctccttcatggtcttgtttgtttgtttgtttgtttgtttccaattaataagagcctgggctgttgggaatgagtaagcatgccaagcagccttggaacctgacaagaagttacagaactctcctttcatcttatttctgcctgcaagatgcccaggttaaaggcacaaccttcatcagcaggacctgttgtacttagaggcttgcaggacacctgcctcccatgaagcgtttcagctacatactttgtacccaaggaccacctgtgcctcccgtccttaattcagagtcgtcttccttacgccaaggatgaggcaacagtcaatttggtggaaagatctctgtaataggaaacgaataaaactatcaatgctaaataaaatagaccactgtgaaacttgggttagatcccacagggaagcgtatgtgtgattaactgcgttatgtaacaagaccgcctttaatagctggcatggttctttttgttgttctaagggaaaagtggccaaggctgaagccagagcacatgatattatttgaaagtgctgcagcctctggaaatgctcctccgaggggtatccagaatcagggttctcacttgatttatggttgttctaaaggtttaataccttttatattttcacaactataccctttgcttccagaagcctctggctatgtttctgctgctttgaatcccataccttatttacccattcaagagggatattttagaactgtgcaaaaacgaaggttctatagtatttgattttgagcaatcccatggatgaaagggttgagactgtacggcagggcacacagcctttacccagccacttgcgagaacccagcagaggtggtcactggacagaatagttttaatgtgtcagccccttctatcggccacagtgctggctctgaggctcctcagccctcacagctctctctgttaggtgtggctggcagggaaggccaagattaagccagggcagattcccagcccatcaaatcagaaacagaagggcattggaagttgtgctagcacaatctacaaaatcagctggatgggaattacactcagcaatgaagactgtgatggagccagggtggagcatcatgggagagtctgggaaagaggctccaacacaatacagggttggggacaaggcggaagcgataagtgtctgaacgctttcaaggaaacaaggccagcttctttgaagaggacttggcacgaaacacaccatgtaaagtttgatacgcgatgctggagacggtgcacatacctataactcatcacaagaggagccagagttcagagttggcctcagctacaaagcagggccgaggtcagctgagactctatgaggccctgtctcgaaacacgagagtggattggcaggctttgccacacacgtacaccatctccacagtcaggataatgatagagctaccatcttgaaacttttctcatggccctttataattccttcccatttccctgggcccgggaaaacatgggtttgctctctgttgtcattggtgattttcatttccggcattcacctaaatgcgttctgtacttcccctcctcccctcctcctttctggcttctttcattcagcgtaattattgtgagactcattcaggttgaagtatgtatagtatttcattcatttgactagacagcaatattccaccgtaccgatatcccacacgctgtttacccgcttgcacgttgagagaatcgtaaattatgttgtggcagttatggatggagctgccgagaagcacccgcatgcatgtgactgcctgagcaaagatgacttttctctgtggtaaatgcttagaagtgcagttggaggaacaaaggcctggcatatatttaacttgttaaagaaacccgtcaggctgtctttagagtaactttcccatttgatgatcccccagcagcgggcaagagttcagccactccacgaccctgccaacttggtatatagtcctctttaatttcaacttttttcccattgtactgtgaacacaacgcgcaacctacacaatatgtcatcattaactagacacagtgcagtctgacaggtgtgaaggacctattcatcttatatagctgagattgttcctgacaaaggcagcccatttcccgtgccctgctccaggcaagcacgattccagctctgtggatgtgacagtattggatcctcacagaagcagtgttttcccttctgtgcctggcagccatattcatctgagttgagtggtactcaactgtggttttaatttgcattcccctaataactgatgcgcagtgcctttttatgtatctgttcaccatgcctgtatcatcttcactgtccacatttctggccattttatttaaatgggcttgctttacaccttatactgaggacaaacaactcagatgacttaagttggatctgtcctgaaagtgtctgtcttccatggtttcagaaaacactatgcaagctgtcaaggaaggggaacaactgagcagccctgtctagctccaacaccattcaaccactatagtgaccaacatggcgagtcatgcatagaaggtgcaataatggcactcacatgccagtggaaaccaacaactctaattggacttcaggcccactcagcaagagagcgattacggctggcattggaaacatacccaaattctcggagatggtaaaggtcctggacctcagaaaggaatctactactgccaccttgcttaccagaatacttatccaccgtactctaaatcttatccttttacccacagataagagtagcttccatccctcaccagagatgcttgtctttacagcaaatggaggccgtcagagaaacatacagctggagacaacataggatatggagagctcagccccagcagatgcatctgtgcctcagggaacttcaaggaaggggaggtagaaagactgtaagagctggaatgccaggaaatcctctgtgaagcagtctctcctagagaaagctgcacaaacaagactggaccaatggtggtatcattagacatgaaattcgggagagggagtgtggcaggattttccctgtccaattacattaaaatattagtgcagcaggaggcctgtgattggacagggaaaagggaggtggagcgaagagttgcagggacagagagcgactcagaggagggaggaggagaagtcaagatggaggcagatggacaggaagaagatcctgatcccatgtggttttaaatagccacaggtagttatgatatcatacaggattgactaattgggatagtttgtctaatctaggtgggcagcttttatcattatcagttggttctgaaattattgtattggcatcttgtgaattgagaatgtctgacttgttaattataagcttctagagttttgtttctactgggttgctaggtgttgtggcggctgactgtggggcagatggtcattgtgtggggctggcttggcagcgaagggaacttgggtgctctggccccaccagagagttggtgggcagagagtagctgaatgaagcgcgggaacatggcggttctacttttaatatttccccacaacagggagaatttcacaggatcccacccctagacaaagaattccagcaactaatgagtcctgtgagaggggagaggggagttagcttctcccagggatgagccctcttcttgttatccagtgcccagtggtcagccctgaaaccatatacaagcaagcatcataacataacataacataacataacataacataacatagtgtaacacatacaaaaacaaaactagtctcagcagaatatatatgtatacatatatgtacttataatctgtgcaagcatatatacacacatgtaacaactataattaaagaaaaagaggcaattaatgagcatgagatgtgagaagagttcaagggaaggtaactgtggctctctggttcttcacctctcccttgcatgtttcagaattggcttttgtcagcttctgtctctaagatgtgttgaggttttgattagaagcaattgggttttcacgaagatatgtcagtggtaaggaaacacatttttatctcaacaactggcccttgaggctggcctaacgtttgacccacaaggaggaaatgatgtacttctatttcaattttaaaaattaaaaaaaaaaaaaaagcttggtggtcctggcacatgcttttaatcccagcatgtgggaggcagaggcaggtagatctctgaattgaagtccatcctggtctacagagtgagttctaggacagccagggcaacacagagaaaccctgtttaaaaaaaataataaaattaataataaataaataataaagagataaggtagacaaataaaaatggggttgtttttctattaagctctaagaattacatgttgcatgcaagtcctttgtaagatgtatatatagaaagagattataatacttgttcccagtctgtggcttgccttatctggtgattgggataggtcctggccctgtgtgctagtgagcattctattgctgagctgcatctggagtttctgctgtgtcttatttttcaaagcacagaactctaaacatagactaatgtttagtttaccagattctttcatgtacagtgccttgatattgtttctgtgcagtctcctcatcttagttactgttctgttgctataatagaacactgtgaccaaggcacttggaaaggaaagcattcagttaggggcccgtggtttcagaaggtgaatccatgacagtcatggtggggagtatggtgtcaggctgacaggcaggtgctgggtcagtaactgggagttactgggttccagcccacaagtgtgagtggatgaggggaggaaggagagggagccagagagtgcaggagagtgctagtgagggatggaagagtagtcagagcttttggactctcaaagctgattctcaatgacacaccgtctccaacaaggtcacacctccttcccaaatccttcccaaacacttccactgattgggaccaaatgttcagagcctggggggccattctcacccaaaccaccacactgtctgagctgagtttactgaaatgttttgtctaggctttctcttagtaagttggagttctcacctgtgtgtgtatgtgtgtgtgtgtgtgtttgtgtgtgtgtgtgtgtgtgtgtgtgaatatggacaaccagttatttctgcatcatttgttgaaaaccccattcctttcactgactttagtttgtacttttgcatggatctgtttctgggcttcagtttatcctgctgatattgtctatctttttaatactatctgcttcttaatttcatagctttagtataaagacttgaaactaggtagagaaatttgtccaactttgttctttttcaaaataatttttggctctctggttcttcacctctcccttgtatgtctcagaattggcttttatcagcttctctaagatgtgttgaggttttgattgggagcaattgggttttcaggaagatatgtccatggtaaggcaacacatttttatttcaacaactggcccttgaggctggcctaacatttgaaacatttcccacagtgttgctcccaagttcactggaaacccatgtatgcagaatgatattatttgtggccaatgagaataaggtctcattctagaccttatttcctatatgtcacccttttcccatgtcatcccagagacaaagtaaaaacaattcaagcctctctcgataggacaagaccatgatgtgtatgtcagcgcccccttgggtgagaatgggcctttggagttataatgtatagtacagctgggtattgaacagagtgctacataggcagtggacagctgagcctttgaagttataatgtatagtagagctgggtattgaacagaggtcttgtgcgtactatctagacactggacagctgagtccagagcatctgtgagttgttctctccctgggtgatgatgcatcccagaagctaagctttcacatgtatgttccccataggctggggggagagggcgaccagcatgcagatgatgtcacggagctgacaggcaaagcctgtcatgaatgggatttcatgaaacttcatcccaggttctaagcttagttgaactacacaggccaaactgaacgcatgtagccggattccatccattgcctcctgaagggacgcctctggtggatgggtccttttatacccctgcagaggcagctctctcatcagacaccctaaaggatttattttgacaatggcttattgagcactaaacatatgccaggaagcatttggggaaggaggcccttcctctcctgggccctagggctcctgctccaatgggtttcaggtttggcataggaaagcatctcaattgtccttccttccctttctctcccaaatctgtcccctggacaaggatctggctaatatgctttgaagagtcccaaggggcttctctgaggaggtggagtcagttaataactaatgagaatacgaacctacccctggaatatatgctaggcaaacctctgcatgcagttactaggagatgaagtcattttgtggttactaagccatgattaaaatgaagcagggtgacatgtcgggaaggtggttcctttgttatgtgaaacttttctttcagtctctcacatgtatgcttctcatacatccgtatctttcaaaagaaacatagaaatatagaaaaaggtcaagagaaaaatcgcacctaatgctcatggctgttaagggaattagcaacactaatcagggttgagcctgcattatttctgaagtcctgcagaatgggcattaggattgtgacctaggccgctttctgcagccatcataggcctcctaggacagacaacagcacacagccacctggccagctgagctgtgtcatcagctaatgactggcgtaagcaaatgactttatttctcttgtttcggcttcacggagatacctgagttaggctcaacagtggtgctcaagcctccaaagcttgagacagcccctaaatgatgtccatcctcagcccgatttgcctcacgttctgtcggcagcctcaaacaggcttgtacgatgggcccctgtgagaatttgctggatttatgtgtgctgtcattgcattttacgtgaagcgaggcctatatccactactgagaaaaataactcttataagtcactttcctcacaaaattgagatatggagaagcctagagaagggcaagcttgtcaagaccagcagaacagcacagccaggcagaactttccagtctgcttggccctgcctcgaggcatagtctgcactttatcagggagactggaggactgccactcctgaatccatggcaactgccccagaagtagtttaaaaaaaaaaaaaaactaaactgaaaatatatcggtaggagctgctaacgaccagacactgtgcagggaatgagctgtgaacaagagggacatggccctgttagccttttaactaactgcagcatatgccacacacctctgcccaaggtgacgtgtgtcctggcacttcggctttgctcgccttctgtccgtccgtataatgggcaggtgtcatcggtttggctaacatggatgctctgagactttggccttcctggcgcctgattccaaacacaggtgttaatggagctgagattgctctcaagtgtgtttttggtttttgttttgtttttaattttgttttcgtttcagggctagagtcctgttgcatttgcagtcagttaaaacatataaatctgtagaccaggctggcctcgaactcagaaatccacctgcctctgcctcccgagtgctgggattaaaggagtgcgccaccatgcccggctagggctacacagagaaaccctgtctcgaaaaaccaaaaaaaaaaaaaaatatatatatatatatctgaatgcagatggtgcacatgcatgcatacaggtccaaaccccacacataaagtgtgtcttaaacacaaaacagacaaacaaacaaacaaaaccaccaaactcttcctttttttggtcttcacttgagccatgttgaaaatattcagtacgtccatgcttttttttgttgttgtttgtttgtttgtttagacaaaatctcaggatagtctattacatttatcccaaagcaaggtaaacctttctattaccatttcatccatctttgcagttcacttgattgccaatcacaatatcagcatcccttctagctttgagagggtaacaggttaagaagcctaccttaagagatggggtagggaattgcctatgacccagcatccaggaggctgagacagggagatcttgaagaatggcctgtgttatgtaaggccctgtctcagaaagaacaaaagggtggggcactgtcttcttcctctctctcgggctttgctggtacaagaactgagtgttttgctcttaggattgctgttgcatcccagtggggaaggagctggcgatttgcctggccttcaaaccctgcctactacagtcttactgccaagtcacgcagcccagctgagctccatcagagaaatgggcactgatgcctgaagttaacactgttctcagcatcgctcatggtcctgcccttcttttaggaatctgcacactaatagggaaagcatcaatccactggagttgctccataatttatagtgatgttgtggtttctcaaaccacctctgtaattgccatttgcccgaaaatcagcagcagagatcttatccagggctatggggcctgcttgttttctttagcctggatatcatcagtctacatgtttatatattttattcagaagattaaagtatggcttaaaggaatatttaaacatttttttaatttagagagtagtcacttatgtgaaataatgtaatttctctattttgaaaaagagaaaaacacagatctgtatgtccagatgatgtaacttccacataaggaatccttaatgtcttctgcaggtctcccggggggtctcatgaatggttgaggtgacccattgcctgaaggccagccagcagtgggagcgctagcattaaaactgtctgttggtcacagtctgccctccagggaaacagcaggtgctttggagcttagtctctcaacaactgcaccatgtctttaagtttcagatgtggttttaaaggacatgggtccatgaacctaacatttctgccactgtgactgtgacgtgttcacattagaggcaagctcgccctgctccccttgggctgtagccatttctgtctttatgagaccttaccccctaagacaataaaaaagtaagtatatgatagttaatgaaggtgaacatggagatgttatttattcaaatatttcattcacctaatgtccacttttccccctctaattatgaagataaaaaataactttttcttattctccccaaaatattatgagctctcagtgctgtcccgtcctgcctatgggtaagacaactctgattagaagtctttatttttccttttacaggttttttttttttttagattttacttatgaattataatgtccatgtttttaataaaaacaaacaaacaaacaaacaaaaaacaaccaattccttaccccagagagcagctatgctcacccaggaagcagctgcacatttgatgggaatgagtcaggttgtcagatctatagcagttcatttttctgaataagaaatatatatttttttacattggcaaacaaaacaaaacagcaacagcagcaacaacaacaacaaaaaccaacccaaaaatgaatgtcatttgcctaccccgttcagtctgcctgcctggccccaagcagctgtagttcttgccaaatggctaagcacaaacgcctgactcagcattttcttgctcgctgcttccagcatcatgtagtgattacgactcgtcagttctcccgactcactgtctccccacagccccccatcctcccccactccttgtctagagcgatataaaggcgtgcacatctactccagcacccgatgctaagttgctgcaagaccagctgctacttcccattcatccagcttctcatggcttccccgtacaaaccctgcatgtaaatatagaggaatccaagctatactgagaagggaaaggaaaagaatccccacaaagtattgtcatcattcagggaacatctgtccatgcatggagatgatggatggatagatggatggatggatggatggatggatggatgggcaggcagatggacagacagacagaaggacagatggacagaaggatggacagacagatgggtgggtggatggatgggtgggtggacagacagacaggcaaagtgagatggggtgtttttaatagaagagcagtcaacagctttattacagagctttatgggaactgtagttcaactacagccaacaagagatgtagttataaactaggagatggtctagaaaagccgatatgtattgtactattttgaaagtttgaaaatgattacttaattttctcaaactcacccactgtcttagttagggttactatggctgtgacgaagcatcatgactgagcagtgtggggagggaaagggttgcttggcttcctcttctacacgccctgttcagcattaaggttgggccctcctgcatcccttactaactaagaaaacaccctgcaggcttgcctacagctggatcccagggaggtatttccttaattgaggtttcctcctctctagcctgtgtcaagttgacataaaactagcctctcctccctaagataatgggttggggggtgggggaactgagtgggaaagaattctgacctttgaataaacattttttcattgtaaaaaaatgctatttatttctctttacaaagttgggagaggggtgaagaactttcctagtgggctttgtattttctagttgtttctgtggtggagctagtgttgctggtcagttctctcccactctggagtactacacatacacacatacacacacacacacacacacacacacacacacacacacacagctacatacatgaatgttgagctaaggcatcctttacaatcactctcttatcccaaagcgtcaggggagagactgctgtatgcaaagcattgttctgggcacctgggtgcatcactgggcaaatggacgaagctccgtttgctcaacaggagttgacagctccagggacattgagcggtgccagggacgggaaaccgcagcagcacacagacagtgggtaagaggttacaaggtcataggtggacaagggagatctcagaggaagtaggaactgcatctgagagctgtgaaggtggtacagcttgatgagaagttctacttgtgaccgaggaagtgtcccacagaaaggggagagctatgataaagctgtggtctgagggcggagctcaaggaaggagaaacagccatgtcaggtcctggtgaggctgtggaaggtgtggctccccgagaacatctcaaatgttttatacagtttggaaaaaaaaaaaaactgtagcaaatattcatctcactggtttttttttccttcagaaggtttgtggtctttacaaaacagaaataatggattaaccaaaatttattctgaagagcctgcacggcttgcttctattttaacagctgtgtaaggggatgcagtgctaaatgattagtggaggatttaatgagaactcaaaaatcacagtctgaagaaaataataaaatcacttctgaaagacagtaccacattacagctagatgaagccttgggtgccatctggctttatcatttacaaatgatcggtctgggaaatgtgaagtgacttagcccatgctacctggttacctgcttggtgacaggcttgtctttagagactgaccagacctgctaatccaaggcccagagcatatccacactaatttagtgaaaacgcaattgttgataacagtctcattgagtttcctagacttgacagtcaaatccaagttcccatcacagtgagtaggatgttatttgtgtttgcaatatggccttcatctttggggtatactggaaattggttgcaggaagatcaaatagttgattcctctgccttttggggaacactggatgtgctttgtggttgcccatcagaatgaaggtttctagttggcttgcttttccaggtgcttttcttacagcctctgctgccttctgagctggaggtaaaaagatgccagagcacagcatagacaccaaggctccctccccagcgtccactcacctgaggctccctccctagcatccactcacctgaggctccctccccagcatccactcacctgaggctccctccccaccatccactcacctgaggctccctccccaccatccactcacctgaggctccctccccaccatccactcacctgaggctccctccccaccatccactcacctgaggctccctccccacccaccatccactcacctgatccctcctcagcatccactcacctgaaaggaaagtagtcaaaagcaaaaaataaaccctgacaccaaatcaccagcagcatacaaagtttggagaagtgtcatgtacggaaatgtctttagaaaccctttttaggacctaaaaccccttacctactaaccaccaacccccttcctccctcctgtcccagctgccacactgttctctgcctctgtgaccacgatgatgtcaggtccttcctctgagtggaaccgcagggtgcttgccttctgtggagaggccacatttacctagcacagtgtcctcacaactagcccatgttgtaacatgtcagaactttatttcttttgaaagccaaataatattctactcgaaatgttggataaccaagttggtaccagagttctccaaagcaacactcccaaccacaaaataggagtgaggtctataaacttgaaaattatgcaagggggaataaaattgtttatatagcataatggtatgtttatagttcaaaagtatcatgttaaatagtttgaaataatgtataactagttctctaaatataaagacattgttctaatgagacagtaggcagtcttgacctgaaactcctcagagactacagcaactgtgaacatctcttgtaagaagttacctagagattgttgcagggaaatattaaaaagtaaacctggttggcccatgctcctgcactcctgccaaactgccacagggctccctctgggccactctctggcgggcccctcccccctcagttcctctcactaccacatggtcagccatcacatcacaatatccagtaccctggtagaatcaagactcttaatgctgaaccgggtgtggtggcacatgcctttaatcccagtactcgggaggcagaggcaggcaaatttctgagtttgaggccagcctggtctacaaagtgagttccaggacagccagggctatacagagaaaccctgtctcgaaaaaccaaaagaaaaaaaaagactcttaatgcttaattagccaatcagatttatgtatcaataatatcacaatttacaagatgccaatacaataattttagagccaattgataatgataaaagctttatcctagtattgtgaaatcatagctacctgtggctggaaaacgccatgcgggttcacgtccacagccatcttccttctcctactctgagatgctccctgtctctacaactcttagctcagcctcccttttccctgtacaatcacaggcctcccactgccctaatgtgattggacagggaaaatcctacaacatgtgataaaactgaccacttgtcacacatcaaaactacagacgcaggaacacaaaagggtggggcaggggatgcagactatcacttgagaatcaggaagatatgaggcaccctacaaaagcaacagaaatcaagcattgtgaggggcagggggagaggggcacagtgtgtgttccagagtgtcacagtcagagggtttcccttcaagtgtttataatatttttccttggtattgtattacatatttaactgcaggttgggagggcagtcaggtcatcttccaatgtaactaaaagcaggcggtggaggaaagctcttctgccactttgaatgtcattgagatttagccaccttcctgcacagcgtgtaaggaggggtccaggtggaacagtggacgacttgatttcataaaatcgttgctgttgatttattggacagcagtaacatcttcattattcagattgcctcatggtcctttttaagttgcagaactgacaaatactgaaatggtcttcgacactgctctagagtcttggcagctgacggttctggagtcggagacaagggctgtgggacccacagctcttcttgcagggtcttttatcttctcgttgaatcggaaaatgaagcaggggctggtgactgtggagtacgctaagtaaactgtgatgcagctggccagcaagtgtcatacagatgctgtggcacatatgaccgcgcctcacccttagcaccgctgcggtcatcttggatgcttagagtccctctcaaacttcccttggcctctgtctctggcacactccagttcctccacctttgcatatgcggttcccttaggaggggctggaccaccctctttacccagcattctcttttcaggagctagctttagcttcttcgctccatggctcacatccagttagaggtccccctccccgccccccgtagaatgtcagtgtctgtacagtggcacagttacagccacacacacactggcactcttcagaatcctgtttagcaagtgtaaggtcaagctctccccagcacctactcctacgctgtaggcttggctgggatggtgagacagctcgaatggcttctagtctcttctcccatcacatcttgcctctatggcttgtttttttcctcagggagaggggatgctctggcttcctgcttctgtaccttctattctgggcgatgttttatattgaggctgccaggagagagaagctgtcagtttggcctcgagcccctccccacgacccttcaaggggagcagcactcacagcttggagcagcacactgctggcccccaggctggtattgaggggagtggttttcagccagagctcttgataagatttctgacaaaaagagacaggagtttaaaaaacaaaaacaaaaaaaaccttgtgacaaaatagtgtgtccgtgagcatgatacatgtttgtctgtctatatacacaaggaggcagaattaagcaactatccatggatttttcttcttagatcttctgcagtgaacacttttaagagatgctaagcggatggcctagttggtcatcaaagggaggagaggcccttggtcttgtgaagattctatgccccagtatagaggaatgccagggccaggaagcaggagtgggtgggttggggagcaggggtagggagtaggggataggggattttcggagaggaaactaggaaaggggatagcatttgaaatgtaaatgaagaaaacatttaattaaaaaaaaaaaactgaaggggggggcggtttcagcggcacgcacggttcagcccacgaaactgagcagtacaaaaagaccggaaatagtcgcctatctgccccgccccattctcaagtcttccctatatgaggtgcttgctttattcaatttcctgttcttttcctcctcaggtgactggatggccggaatcccctcacacatcctcagcagctcgccatcagaccagcagattaaccagctggctcagaggctaggcccggagtgggagcccgtggtcctgtctctgggactgtcccagaccgacatctaccgctgcaaggccaaccatccccacaacgtgcattcgcaggtggtggaggcctttgtccgctggcgccagcgttttgggaagcaggccaccttcctaagcttacacaagggcctccaggcagtggaggctgatccctccctgctccagcacatgctggagtgacctgacccccccccgcgccccccccccacttgctgtgggggtggtggggcgtgggttcccaagtcacactggctgaaccggacttttctcagcaggtggctttgttctgggcttttcagtgatctgtttacggaaagagatcgtccaccactcactcaaccatcgattggctttaattgcttgaagactgcgctgttgtaactatggtttggaactttgtggctggcctttaacaggaggccagaaaaaacacaacacccaccctacccaaccccccaaaaaatcatgctacagcatcgaatgcaggtgtcctgcatacaaggcagctacacttgtgttgcctggagactggattgtgcatttagctcttcataatggtgatgataataaaaaagcaaattgtgatatagaatgtgcctctttcaatgagagagtattatatcacacacacacacacacacacacacacacatacacacacacacaccactcttctgttgcatagacggagggtgtaaaaatatgggagtggagcaagattgatagcagtcatgtgacgacggagataaataactcaggcaggatgtatagattaagcatgagacaccgaagctccctgcagaggccagggagagaacggaagaccttcatcttaacaaattgtatgaggagtctctgtccatttgttaaaggcattggatcagagacaagagggctcagtgtttctcttgaggcctgaatggctgaaggcggtgagttcccgaggggcgtcatgggttgtccagcctttcattaactgcacatagtgttagccagacaggtgtacgtgtttgtcatcccatctaagagactgaagcaggaggatcacctgtacatgactgcttctttcaacattttaaaatgtgtaacttctattaaattctctcagtgcaaataaagtgcgtgtccattgtgtcctttcaaaaacctaacaatagataagatgaggagaagcaagagtctccttgtactccccgcagtcagtcagctttgctctgctctgccgtcagtttcttagttaagcccgcccgcacatcccttctgcagctggagcaggattgccctgtaaggctctttaacacttggcttccttgccttaacacatagcacttgttccaatgccaaaggcctttacaacatcctttgctcttagagcacacttgcaagagctatcgttttggcagcacctttaaagagattgaaggcactcagcttctaagtctaccaactgctttccccatcaagaagttcgctggcattgcagttcttgcttgacacacccataaccccaccccacccagaaccaatccgagcaaactattgttcactgcctgcactgtgcaccttgcatcctcacaaagcttagcatgtctgcattctgagttttgtcccttgccccaagatgtcctctccactgtactacatctaattaccgctgtgtttcttttcttcaagagaatgttaggggagggacagtcaacacagaagttgcacacagcccctctgcttcctgagggtgtatgcgcaattgacagttgccggagggagagactggcagtatagttgtcacctgtaagtgtccctgtgacttctcaccattgtcctcacaagtagtcctagtaaaactcattcttgtaccagtccagatttgggtggagtggtttctttggtctgtcatcttcagaagccctctctgaggcacacagacatttgctcagatctttccggaaaagctaatgcggctgagaggctaatctcatctctgttaattgaggacattaaagccgaccaacaaagacacaagccctactctctggagctcactgccacatgagacagccacagacctctaatcacaacatgatgtgacaattccactcctgagtactgagccagtgggaacagagcaaaaggaccccctctggtttgcttttgaggggatggggggcctgaagaaaaagaaggctccgtcactcaggtaaatcactccaccttcttgggcaggtttattcacgtatgcacactaactggtctatgagtgcagaggatctgccagaggtaaaaaagataaattgttcatacagtgggtttggacaaggaaatgtctgagctgaattattttggctactgagttttgttttgttttgttttgttttgttttccctaatattctttatcaagccagggtccctcaaaatgttaggctgaggtccctcatccttctggggcttgtacagcagctgagagtgtgcagctcttctgggcatccctagggactcagggtaaggaaaaatgaactggcagcacacggcagagcatgtccagaacctgggtgggactctgatctaacacttagctctcattaaatgaatccctacagttggggcacaaattcttgctggttacaaaacacccaagttactggagatccgaagataaataagacacagtctctgcccagcaggatctcggccctccaggaaggcagccataacagccaggcaactctgacacttcacagaaaagggagcaattaagttggccacagaggagatgacacttcggctgagctcttgtaagccctgcccaagttagcgtgatagccccccccttaggggatattaggagacaccagaattccatttaatgtcttcttcatccagcttgacaaatggcactccttccaaatgtctacaagatgcatatgcctccaaaatgctatctcggagccattagaaactaaacacattgacaaataccatcctgttccatacttctttatagcagtggagtgttcagccacagtaaaatcaggatcaggcttcaaggatttaggtatcaggcatatttgagggtgctttttatagcacccctctctcccccaccccaacacttgtacaaattcaaaatagatgttgcagcatacagggaatgtttttaatataatgtcttgtttacttccctgaactataaacatctgagaggaacagggacgtctgtcttgttggcacttactgttcttataggaaaattaaagtctctcaaagacacagttcagtgagccaattaaaccttgtctctgctttgttaagctcacgagaaacatatggtagtgattctgatagctattgttcattcaaagcatcagctatgaaatccaggtttgaatgctcagaaagaaaaagcagattcaacatcttggcaataagcatgtatttccatctcattttcgtattttatctctagccagtgctgttttgggtgtcacattacattcttgatggagagtattttcggaaaatgtaaaatgggctggatgtcatgaaataattattctttttgctcttggtgacacttaaccgtccctgtttctagggagacaaattggtgttgtgagcaccttgccagtgccaatgacttcgaggtgacttagctcagtgctgaccccggatgaggctggatgcctcctcatggctaagctggaaatagatggcaatgacctcgcgcctctggaacacactttgaccaaggatgaggcatctgcgcaggggatgtctatgaaggcccagaacatctgccgtaggaagtggttcttctccattgaagggcacagatttcttcctttacaaatattagaaaatgatagagactttcttcagaaaacacattgagcacttgcacactctgatgtgcacagatgcagacatgtacgtataatgttctacacagacatgttgacatataattttgaaggaattttcagtacttctgaatccaattcattcttcccaagaactactcatgtgaaccctggtcttcctgcaccaaactagtccaccaagaataatttttttttattgttttaaataatattgggaagccttgagttcagtagggtggagctgtttgtattggattacacaagggtataaatcactgtgaaggtgttgagataaagatagaatcatttatctgaatccagatttttatataactgaccacagatcttttcttttggggaggggcactcttaggctgacagtcctctggacccacctcttggcaaagaagagtttacagctgtgaaatgtatgacagtctctgcctccaagggacttcctgccttcaccttgtctctttagaaccagaactcctcagcgaggaagaaatgagtgttttatgcttagcactctaagaatggttggtttcttgggggaaatcagagaaaacagagtcccatttacttcacacactgggaaattgttcctaacaacatctttttttgcaatcatctgcttgaatctcgtttctcttagcttctgggagcagttatttttctgctcagaaaactaagctccatgctggctttctggtgagggagtggaccctttgattgtctgttttctgtcgtcaagacatcatctgtcactcaatattgtcatctcctgcttcccaggggacatcttgtattaatggctataaataaaccccaacacgccctttctgaaagtgtgaataacaaagcgtaccacaccggtcagtcaggataagatctcgctcaggctcagggtaagaacattcattgaggaggaatggagtctttggagttttggaggaagataagtaaagacatccatcactcatggatttcatgggagtcgggaagaaggatgaggttagttttagagtacacagagactggcgttcctttgcagttagtcaatccctacaactaaaaaggatgaagcattccttaggaatccctgctttcccagggcagaggatgtaggttcaacattgtcaggccccatttttgttcattttgtgatactggcctttgcttcgggaagtgtccaggatacttgttaagtgtggacaatttaactttgtttttgttttgtttttctttctttaaaaaaaaaaaagatttatttatttatttatttatttatttatttattcagaatacattgtagctgtcttcagacacaccagaagagggcatcagatcccactaccgatggttgtgagccaccatgtgggtgctgggaattgaactcaggacctctggaagaacagtcagtgcttttaactgctgagccatctctccagcccgaatttagctaatcttaacccatcacctttcactttataattgttactgttcttagagagcacagggcttggataaagtgaacagtggtaaaagtaagttttgttgttgttgttttgctgttttttgtttgtgggaacaggaccaaggatggtggttgagaggtgaaaaagtcacatgatagatcccaggtctcagactctggagagcagcattggggtgcagatctgagtttattgcccaatgcataagcttatatgcagtgtttgagccaatcatatcgtgccatgccatcaccgtcaccatgccccaataaaagtcccatcacctgttaggacttctgagaagatgtgggaagcagtcaccaccctggccttggttcctatgactatcttgctggtgttctagagccatcttagatctaatgccctggacagcagatctggattcttcgaggagtcacaggagctgtggtgcctcgctctccatcctacttttcccttcacaaggttgacctccacgtcccccacagttgtttgtttttacatttttacaggctgatatgatgtagatatcatttgttcctaaggattcatttgttagtagcatggtcggtgtggtgatgtgggaagtgagatctttaagagtcaggtctggtggaagtctttaggtctttaaaagctcttcatgaaaaggaattaagaaccttctagtgaaatcctgggtttttcagagggtgggtggttacaggattaagagtgacccctgaatgcatctttgtatggagttctgctttcctgtttggcaatagatctttcctagtagcaagctcccctgccgttaggctcaactctgccagggacaaatcaatggagccatccaatcttggcttttccatctccaaaactgtaatctaaacaaacctctttctttataaagctagccttctttagctattccattgtattaattctaaacaagagcctgaaacacacttgaaagaagaaaaatcagcgttgtaagatttgtgtatgagacaaatcagactcatatttcaggagccctgttccgtaacagacacttgtctctgtatttaatttgggaaaagaaaaacaaatggccttcatcactaatgctaaatcaaatgaaaggaaacaactcttcttaccgttctagaaaaccatgggatgattttcagcttgggtcaatcgtgaaagcttttcgtataacttccacaaatccattccacatacattcatccgcttactaagcacctccagtgcaccaggcaggaacttgggccgtgagcttaggtactcgatgcaacagtgccaagtttcttccctggaggagctccccattgccgagaaaaagaacataaccaagaaactgctagagccagaggaaggagaactattcaatgtatcagagagagcctcatgagaaggccgcacgccagtggactgacttacgcctgtgatcctagcacactgagggctgtggctagcctgtggtcctagcaccctgggggctgaggctagcctgtggtcctagcaccctgggggctgaggctagcctgtggtcctagcaccctgggggctgaggctagcctgtggtcctagcaccctgggggctgaggctagctagccgttgactcacttactgggaaactcatcaagctatatttttctacaaaacatttagaaaacatagaatagagcagtgtagctcccacatggaggtgaaaggagtggagctgtttagagactatgtgtcccctacacccagagggtcccccaaacccagaggatccccctacacccagaggattccccccacacccagagaatcctacacacccagacaagggtagatcaaacccttgaagatactcttgagaagacaccaggaacatttgtatggagctgactttctcttcccctgcgtgcatgtgtgtgtgtgtgtgtgtgtgtgtgtgtgtgtgtgtgtgtgtggtggggaggtgctgctggtggtaaggcttgttttaaaaccaggcagagtttggatcacaccttttagattaaaaatgtgagaggagaaatctcaagaccttcaggtgccagtatgcacttgcgacccaaggtggaagaggggactacttcccacacttatctgacattggcgtcttgctatgacaccacctatgaatgtatctttggaaatacttgtttcacagacatactgaggtcaagaatattcatccttggagtgcaatgggaaaactagtagctcacgggttccaaaaatagccaagactctttaaaggtcacggatagtatctcaagtgatatttaaacaagggtaatttattctccttcccacccgcaatccatcttcaccagtgtaacacctcacattacagaacacttgcagagagacatatggttttctgaatcttcctttcgtcctttaatgatggatacatctgtcatatttttcactcctatgactccactatccttgcaagttttctccttggctttttttttttttttttttttttttttttgagacagggtttctctgtatagccctggctgtcctggaactcactttgtagaccaggctggcctcgaactcagaaattcacctgcccctgcctcccaagtgctgggattaaaggtgtctccttggctttttgtgagtttaacctgagccatagcatgtgctgcatgcactttggtggccagtgggctctccctctagttatcaccagatgccaggtggcacccatactcaagcaggcaggaactaggtttttcccctaaaaggaactgtatcaggaaacctgtctgctgcccaggcattttctgtctgctcccattcttactactgtcttcctatttgcattctcatttgctcacctggagcctcctctactgagccctgacataattgaccttgactttcatcttctgtttgtctttctagtgcagtgtctattaaagcctccatttcagcaattcatcctaactatgaatagtaccacacacacagaaacacacacacagatatatacacacagatgtacatacacacagataaacacacatacagataaacacatacagagagacatacatacacagatgcacacacagatacacgcacagacacacacacacacacacacacacacattctactacatggcatttagaaacatttagagactcttcttttttgcagtgagagttgtcaccatgcatcgcattggaagaataggggtggcagaatctatggatatctggcatactacagataactgtagatgataaagagatgatctgcccaaagcgacagtgacactataatgttagccaccatgttggctgccttttctaaccagtgcaacttgacaacgtaatctaagagaagaaaagtttatgttggctcacagtttcaggagacacagcccatcatggagggacatacatgctggtggccatctgtggcagcagagcctggagcaacacctcttcagagcatggcagatcaaggagcagaaatggaaccaaaagtagaccccaattctaaccctcaagagctgtcctcagtgacttattgtctgcaggagggccatgtacaaaggttccatgactttctcaccagtgccccaggtgaggaccaagtgttacaatacatgaatctatgaagaacaattcttagccaatctataaccactgccgtggatccagaccagtacactttgataatattcagtatctaaaacactacccatgctggtgtccacttgcttcttttctgggaacatcttatgataacatatcctttaggctttgacggggccattagccgtatataagctttctcttctgaaccacaaacgtctcagcaaacaccgtgggggctcctcagtgtgagcatgatgcaatcaatgggaatgtgtttgaagacccagaaacactctctgctttatagagaaatgcctatcccttggcaaaaacaacagccatgacccaggccaactatctcttttctgattccaaggtcaagcataaagaaatgaggcttacttgacatcatgtcaagatcccatctaacctaattcagagtctaccatacatacagtcataattatgaaagtctccacaaaggcatgaaaccatgaatgaacacatgtgaggtagtcctcccagttcagttctcaacatagaaaaaaaaaagctttcccagaatgcagagcaatgcctaccctccccgactccaaggactcgtggattagtaatgtagacaggcactagaacttatccaattagctaaattcctgctctgtctctcctgactcatcctgcaggaacaaatcacttctgtacagtgagcaatggaggggcagggtgcaggggaaagaagaatcatcatggaactcctggtagacaccaggcctttggaaatgattctaagcaagcatgaatgccctttcataacaagaaactgtagcagataaaaagcagcttcactttatgggcaactaaatgtagtataagggttggcagctctacctttatcctgtgcctgtctcccttgacttggggtcagatttctactgaatttgccacataggtgtattaatcactaagggttatgtactggctggttttgtgtgtcaacttgacacaagctggagttatcacagagaaaggagcctccctcaaggaaatgcctccatgaaatacagctgtaaggcattttctcaattagtgatcaagtggggagggcccattgtgggtggtgtcatccctgggctggtagtcttggattccataagaaagcaagctgagcaagccaggggaagcaagccagtaaggaacatccctccatggcctctgcatcagctcctgcttcctgacctgcttgagttccagtcctgacttcctttggtgatgaacagcaatgcggaagtgtaagctaaataaaccctttcctccccaacttgcttcttggtcctgatgtttgtgcagggatagaaaccctgactgagacagggtatctgtctaaaacctggcgacaggagactgattagctttcaatgtcctcacctaccccaccctttgtcaaagcttaaagtacaaagacaaaaataactaagttatttttctgctatttttacaacatcctgtcccagactccactctcacctccagagtgacccaaactctgcagtcctacagtcaccctgaattccagaaacagtggagtggcataggctgctcatcccagataaggaggtcctcctaagtgcaagaattaccagtggctgggaactggatctgcctccacacccagttgggagcaatcaccccttgggaactggattgtccctcaacttcgtaaggacatctctgaagctacattttggaaccagaactgagataatggtgagttgtgtcccagtttgagcaagcctgcttaaataagcctcttcttacctcaaccctgtttttctctacttagaggaaaaactactatctgcaccccaaaacgggctggagtagttggtctccatctttctttgacatggccttggtgataaaaatccctccatcctttcctttgtctttctttggcgggtaggggatgtgtatatgtatatgatgtgtgtgtgtgtgtgtgtgtgtgtgtgtgtgtgtgtgtaggccagaggctgatgtcaggtgtctttcttgaccactctgtaccttctattttgagatatggtctcccacttgaacctggggctcactggttggctagtctagctgggcagcttgctctgaggatccctcatgccttccaagcactggggttgtaggcaagccatgacaacggactagcatttccattaaccctggagatttgaactctggtcttcatacttgtatggcaagcactgtatccactagtctacctccccagccacctcctataccttttcccatcaactctgccggcttttctttgggacaggtagctggatgtgacttgtaatgtttccagcctaggacttcagctatagtttaatcatctgatgttcttagggaccacagggtgagccttgtttaccttacttattttgcaggctggagaaactgatgcccaggaggagttgcacgagaggggatggaaaaagtaaggggctgagatagagacttgctctgtaacaggtggatcttacatcccactcctggtgatactgatatacatatatgtatatgtatatgtatatgtatatgtatatgtatatgtatatgtatatgtatatatatgtgtgtgtatgtggtttaattttccctttccctgctattacagggaagacacagctgcctcacttttgccagccacacagaacatgagctccttgtggcaatctgtaaggaacccttctcgctctcgatctccaccccagatcccctcttcggtgcccgtgaagcccaagtcaaagctattcccaagatgaaatgtcattagcgtcctctactcttggagacatactcctcctgccctttacctcctgtcaccacactctgctttccacacagctaatctgatgtagccaccaacaggattgggacatggcctgtcatgtggatttgttaactccagcaaagattatctaaggttgctcttggctagaaagtttgggttcccaagtaaaagccagacaattctcttcccagctctgtaaacaactttccaatggggatgcccgctcctgatgctgtagggcccgagtgtttcccaagccaccggacaggtcaagctgccctttgcaagttgttgcatgcagactggcctctttgtttcccccctctttttcctgacattgtaaattccaaagaaatgcttatgatgttaaatgccagagtcatctctaccaggaacaaggaacagaaaaacccagcaggtcatcaagtctttcaatcagcaatcttcctgcacagaacccagaatatcagtgatttttttcagataacgccagaatgagcatcaaagaagtggaccactgtaggagtcaagattgctccggcatttacctagccatctgtagctaaagagtgctgtgttaaatttgatgtgcaagttcctcacttacagttgttagggaggatggtttgttctggacaggaaggaatctatcagcttcagcttgctggcttgctgctggtaaaagctcctttctctcctgtcaagctgtttctcaagtccccagcttcctcaggaatcagtagaatgagccttctcacagtgagagacccggagtttacagctgtaaacttacagtgagcacatcaggcactaacatgcatgggtgggatttccaggcacaagagagacttggaacatagaagggaatcccatggccagactgtcagcatggtgggggaggaaagatgaatggaatgttttgcagtctccccaccctttcatcgttctcagtcaggatggttccttatagcaaaagagaccaacaagagatcaggaacccaatgtttaacagcatgagtgcctgggtaataggaaacagagagtaagaaagagtaagttcaggctgaaatcccatccgttcctagaacagagaggggggtgaggggcaaggctctgcggaatcctggcaggatactcaggaaatgctcagcaaacatgattaacattttctgtgtgcttccgcttcatgccttccctgttgggctgcgtttctagttgcgtagagtcagccattcctcttggcgctgagaggagacaccttagcaaaggaagatttccttttgagatggagattcctctataaaaaggctttcttccgttctgtcatcagcttctcctgtaccaataaccagttcaaaatattccttacaccgtagaggcatgttgggcgtgacatataccagcgcccgacagtcacattttgtaggagcaggttctgaactctaagcatctcataccccccccttcccccactgattcttctttttaactcttgaaatggctttgaaaaatacttcacctgttaccacagacttccttgctcttggctggctcacttagttatttagcaaacaagttttcctagtgtctccagtgcaccacgataggtatacttagacggaggctaccatagctggagaacaaacaaacaaacaaaataggccctaccctcatagagcttttaatcttctttaaattcataactatagtaaatgataagaagcaaactacgtaggctagagaggagagatggctcagtggttaagagcactggttgctcttctagaggacctgggttcaattcccagcacccacacagcatcagaaactatctgtagctccaggttcaggagatccaattgtcatcttctggtctctagggtactgcatacacgtgacatatatacatacatgcaggtgaaacacccacacatgtaaaataaaaataaatgaatctttataaggaagcaagctatgagaacacattaaggagagtttctcagtgaggggggtcacaggctgtgggtctggactctggatctctcatcttggtctgacttccatcttgctggctcggttggttgctttattcatctgctgctgttactggtgttttacgataaaattcccagttccccaagtcctcacagactgggttcagtatggcagctgaagggcagagaggaagttcaatcattgacccccgagtttatcccaagtactgatgtgaattttaggttcaagcagaggaagaattagggcattgggaaagagaggtgcctaatcaagcacttttggtcagggtgtgatatggttaatcactgtctcaggcttgcttctgcaaggtggttggaagaagtccttattgtataataagggaccacttgtttttctcgaagggtttgtttctgcttgggggtaatctcatcaccggctgatctgtcttcaaaagtctgtttctaaaacccaaggtaggtttgggacagtgtctgggttttgtggggcacagagccagaccatgggaaaggctgatggtaagacacctcggtcactctcatctttgtgtctttagttttgaagcaggacaaaaataggttaggtgtcatcaggttcaaggggggacactccttaagtcatcaatgtgcctatatgccgagttcctaaggagtggccattatgccttcacagagttcagctgcagtctagggttgctcgttatcaaaattgagaagaacaaaagaagttacgataatccacatttctgtttcatggtaaagatttaagagagtaataatatgtacagttaaaacattttttaaaatgggcaatttcatatactattgaggaatatatcactgtatagccttcagtgaagagcaactggtggttatagacatcccataactatggattccacattaaagaactcaaataaccaagaacagaaagtattggagattgttcaggactgatgtaatccctaccactatccccaacacacaatagtaaaatagctgtcgacataacgctcacattgcattggttactaacagtggtcttgatgtgacagtataccagggagcatgtgtgtgcattatttgcaaatactatccaatccctgtaaggagcttgtgcgttcacatattctggtacctgcagggaaggcactagaaccaattccctgtgcataacaccagatgactgtatacattaaaattaaaatcttaaatatgggtttgattcgattccacaatgatttttttgggaagactgaaaatgaatggacaaaacccattacatcattgcttctagggcaaactggaaacagagaaatacatgctatgagaatctatgatactgtagatccaaatataactggtttcctgtagtatagtctttctaaaggagtgaattattataaagtaaatgaatttacttcctttcaaagaacattgaaagagttcaatttcataactcttatctctacttaatgatgtatttttgctttgaagccttattgttaaatatttcaagcaccaccaaccaggggaaagacacaagtttaattaatatctattaatgaaaaatgatgtatgagatatactgcttattaaaaccatcattataaaagagaacatatatcatgaccacttatgtttaaatatatacaaaggctcccagtaattacacagtcgttcacatcagactaaacttcccattaataatgagaaagcacatatatgcaaagtgctaaaaacagattcaatatcaggcatgaactgatgggttatactcgcacctaactgacttcctccctacatgttcacacgtctgcaggaaacaggcttagtcaactagggaacttgaaggaaggagtaacagaaggtttggtccagcggagagggagagcccagatgtatgtacagaatcttggcagaatccttaagtggaaacatacaaggcaaaattccaaagatcacagcagaaaacagcagctggagttcagaatgatgagcagagatttcagcagctgcttggcactgggaagatagggtttgaagttaaaatcctatcgactcaggaaaacgggacaaacatctctagaatccagtctgtaaggcatgagcagcgtgcctctgctctatggagcacattcccagagtgtgagccgtagcataggactgaggacaaaactcaacatgacgagcttaacaaggcttaggaaacagcttacgccacagaaggggtatccacaagaagctcagcttccagtggtgtaaaaccaaatacctgtcagaggaagagagcataaattctgctctctgcaacgtcccacatacaaccaggatcagggacgtgcaaagaagtagaaaggtatggatcagaacaaagaggaaaaactaacgaatgccagaaaataaagggatctccacaaagcaagtgtgggttagacccagcatatatggaacttaagatgactatcaaacttcacagggacagattaatatactgtatgaaggtgtggaggttgtagagaaaaaaaatagagaaactcttaaggggaaaaaatggaaactttagaactgacacacattctcacaactgagaaaataagatatctgaagttgaaaaaaaagacacctaaataattggaaacatgttggctaagactatcagcagtttggaagaagcagaagaaaagaatgaggcatttgcaaagtaatcaacaacataacagcagtagcagcagcagcagcaacagcaacaaaacccatcaagctgaagagagaaaatatttgaagagaaatgagcagaacatcaattatctaaaggaaaatgcccatgaacatgcattatctgaagagttaataagaccaaagatacttaaagagggttgacttaataacttcctacatttgaatagtaatatgattttggttttgagacagggtttctttgtgtagccctggctgtcctagaactagctctatggaccaggctggcctcaaactcacagaaatctgcctgcctctgcctcccgaatactgggactcaaggcatgtgccgccaccaccaccaggcaatatgagttttaaatctaagaaggaggaggaggagatatcttcctcaagtgataaaaagatgtatatacaggagtcaaaggagaaggatgcccaaaaaatgttcatcagaagtaacgaatggtatagacaggcaaggattgggcttgaaggtattgccactcatctgtaatctcagtgttagagaagtaaaagcaagaaaatcaggcactcaaggtcatttttggctccataccaaggttaagaccagcctgtactccatgagatacagtctcaaacaaaaagacttctcagtctaacctcccagtaacacagcatcctctcctttaaaggatgcttgctaggtagccaaggaggacctaaaacctgtgatcctcctgcctcagcatcccaaatactagtattattatagtcagccactcttcttcccagataagcatttaaaaaaatttattccaagtctctgaaattatactaaagacatacagtagacaaccagtggagaaatatgtgcccaagaaaaacttatatcttggtaaacactggatgagcctgtggtgcctgaaccatgaccctgtcagctctaccctggacatggaaaattataaatttgaggggaggtattttctctctcctgtactcccaatttggggctacaatgtcaccctttcaggaacagaatgctggcacattttgtgtcagtgattcaccaaaggatgatactctggactcaaatagcatgtaaatgcaaaaagtgttttattctgcagaagtcggcattctggggtctcccattaccagcatagagagagacgctcaaatgagtttgcaagcccgatttaaagcacattagggaatttcggggtaggtgacctctatgttaatctgtcaggtccatctctatggacactctattacgggtgtgtagggggctggaaaattgatggggtgatctgggaactgttgctgaggaagtctggaaactgctgctgatccgttgtccttgcctcgggccaggtggctgggcagctgctgaggcctggacttgcccaattcttggaaacagggatttaggtgttcttaacttctagtttgaagcctgtcatggagtcagcctagccttctcactccgtgtggtaggagctgtatttcaggtaggcagaaccaagggctcacttcttctatcaagccataccaatgccctactacagaaaaatctgtctcagctgccataggccatgggtactgctgctttaactactgtgtccactgtggcctggtcagagagtagagtttccacactggctgaggtggcaggacgtttcctggggagtccatttctattcatctcagacccagacggtgtctcagtctttttgctgtgaagagacaccatgaccaagtcaactcttacaaaagaaagcatttaattatggacttgattacatttttttcaaagacttagtctattatcatcatggcagggagtgaggcagcatgcaggtctacatggtggtggagcagttgagtgttcgatgccacaccccctaatccttcatcttgtcaagagttgcacttcaattcaaatatatgagcctataagggccattcttattcaaccaccacagcaaagatgaaccaaagaaataattctagcccagcccagcccagtccagcatagtgaatcaatgagtttgccagggttacttgcaaagcattgagatgagacattacttctaggggtgtggtcagcagagccactgaaaagtcctctcaagcccagtaacaactctggaaagctgctttatggcagcgtcctgcacaacttgtgggtggatatcagcccacaaaggtggtcttttctccagcaatcatttactgcttatacaacctcaggaagaccctcatgggaattgtaagtttctttctttctttctttccttctttctttctttctttctttctttctttctttctttctttctttctttctttctttctgtccttctttccttccctccctctccctctccctctctccccctccctctccctctccctctctcctcctccctctttccccctccccctctcctcgaccccctctccctcgccctgtagcccccacaccacgacagaagagacccaatacagagcctgggaacggagtgcccagataaactacgccaccagaaaggtagcaacggcgggaacgttacgcaatgaacaacaaaatgcaacatagagcgacggaaacaacataaccacccacccaaagacagagaagcatggaatatctcaacacatcagaaacgctacccggccaaaacacaaactatagtcagctgatcattcagacgccccccaaaaccctgagacgcaatagtaccaacagaatagacaggcccacaccgccccaatactgaggagacttacaacgacagggatataacccctaaacaaaatccacatcgccaaactctctttgacaataacatatactcatacaaacgcatggacatggtccgcaaatcaaccgaaaataaaatatacagacactcgcaaacatattctcccaacaacaaatccatgtaccatgtgaaatacatctctacaacacctccccccaaatgctatggatatagcgaatgcgaactacttagtcgtccttcgtaggagctaaccacacaaccgccataccatatgttctgcctcgtgaacgaataatggcagtaacaactacgccgtacaaaccgaaaaacaggaacctgaataaacagaaacacttacaaacaagcgatctcaaataacatcgccacacaccttctgcagatgaggcgtcacgaactcacagcggttagatcgagaatatatataaaaccttccacatccgctactggagtacacaaacacgctacgagtctcccgcttggttcacagatacacaccatgcaacaatagatcagtccatcgctcatgacgctccagacaaaatctcctccctcaacagaacataactcaacgagatgccgcatgtacgcatcatcgcgtacaagaggcatatctcatccacgctcacgcgttacatacgagaagcggctctcgtcaaactatagacagaagncacgggacaccactcaacatgcgaacatcgctnnnnnnnnnnnnnnnnnnnnactgtcgtttttttccttttctttgtttctttgtttgtgttcctctagtgagtgcgtgttggtctagaggtgtgtcgggttcggcttttctttgttgggctgtttttgttttgcttttgtcgttttcctttttgttcctcttctcttgcccgtgttctgtttttgttttgtttttttttcttcttttgctctattttttgtttgtgttctgtgttcttggtgttttttgttgttgctttcttttatttttttttcttttgtctttttgtgttttcttgtttttttgtattcttgttttcttttcgttttttccttgtttgttttgctttctgtctttcgtttttttgtttttttgctttctttttttttcttgtctggtggtggtgcctttctgttcgctgtgcctccctgtcacagtgtgcgcattctttctccgatgcgctgtgcgtggcgccgttgtgccgccgtgccgctcggtggcgacacgcgtcacccctctcgtcggtccccgtctgccgtcgcccgtcgtggcgccctccccctctcctcgtccccctctccccgtccccctctccctctctccctctccctctctccctctcctagagaatattttgatttaaatttttatgtgtgtgggtatttcctctgcatacctgtgcaccatgtgtatgcagtgccctcagaggccagaagagggcatcacatcccctgggaccggagtgtcttggtagttagccaccacataggtaggtgtgggttcttaggaagaccagcaagtgctcttaactgctgagccatctcaccagccctaggtcatgtgtattgctccccaggctcgtaagctactgtcgagttttatgagtcgccttttcaagccgctgtaagtggatgcatggatcagttttcaagctatatcttttttttttttttttaggcagggtttctctttgtagccctggctgtcttggaattcattttgtcaaccaggctggcctcgaactcagaaatccacctgcctctgcctcccgagtgctgggattaaaggcgtgcgccaccatgccggctcggagctctatctttgagggaagaaaggggaatgctcagatccagatcaaaccagatttcctgggcccaaggcccagcgttagctcacttctgagaacccagacttaggagacaaacaatgtcaggctgtcctctgcgggtttttttgtttgtttgttttgttttgttttttttcattctcctggttcttagagatcttcttggtccttggaatcaatatctcccagtctcaggaggcttcagaaatgagtgaaaacagacccaaatggcaatagtgagagagttggaatggctgtatccatggggccaaaatagtcagctcaatagagtataattttattagccttgagggtaacttaactgagcttatgaaaaagcagaaggaatcactttatggttcacagggaactaaaccgtgagggcaaattcagacacaaatatggaaacgcctctgtaaaacctagcacattcgtctttgatttctacatacacttacttatttggccatctaaaatgcccatggaatttaatgtgaattgctacatttagctttctactgaaaataaaaaaagaaacttttaaaacattgaaaataggaagtatgactagaggctatgcataacattatgctttttttctttttaaattgcaaagtaagtaggtaccgggtatgatgctagacactgagggtttgaagagaagacagttcatccccagcttcaaagagcaaagtattcatataaggacaaggaagagaaagttctagaaaggcagccacttgtatctctctgtattagacctgtccggatgcaggaactgactttcccagtcatggtgatccaatgaagagatcagccgtgggaggaactttgggaccatgcatagcttactttgaaggcatcatgtcatttcctgtgccaagttccattgaccacacaacttcactttgttccaaagagcatgactactagggatagggatatgtcaggaacccacttgagaggttggccatcataggtctctagtgacaggcagaagaagtgagtcgaaagagaaagtactgcttttaatgaatagtgcatccatccaagtcttaatcatggactaacagaaaaccacacatctgtgaccccagcaactcagaggctgtttagaaggactgtaggttcaaggagagacaacacaacaaatagatgcagaatttcttactactagatccctaaatctggatcttaggtcactgtactctttagaagagatacattgtatctagaagagatgcattgtatctagaagagagatacgttgtatctagaagagatatgatgtgtctagaagagacacattgtgcctagaagagatacatagtgtctagaagagataacttggggaaagacaaagtaaggggaagttccctccctaggcctttgcctgacagatatagatgctgaaagaaatgactattcttaccagccaactacacagaacaaagcactgttcttaggtagggcatccctgcctgctgactacaagactctgtctctggccaaccagatcaccaacttaatctccttgtaatggcgaggaggcaagaatgagttcaaaactcttttgtcctgtccagaaaccgttaccatccttgctcttcctacaaggaaactgagctatggaatagttactgaagttgagtgtaacctgtttctaaaaagccatgaggtagcatgctaggctttgctaccaggcatggtgggcagaacaggctagagatgtaattactgctgcacttgtgatgagcttccagatgtatcttctagacattttttccatgccatgggcatttgtgttgtaaaggagctttgggtccacattcaaaaaaaacagaagcccagggaaatagaagcccaagtgacatgtgtcacttgcctgctctttgcagaggtgagaaagcactctttcctaaggttaatggctggaaatagaatataggtgcttcttccttccttccttccttccttccttccttccttccttccttccttcctcccttccttctttctttctttctttctttctttctttctttctctgtctctttcttccttttaatcccagtttggtactttgtcctttgtgatattagcaagggctcccacgcataggctttctttaaggttgattggaatattgttcttcaactgtgtgagaggggagagagtgtggtaggaagagccttgagcatagagcacttcctcaagctcaatccagcaccatctcaaacgggctagtgtgattcaggcatacactccttggctgtgccttctggaaaataggtatataacaacagctgctgacttctccacatggttccaaaacgaaaaaggagatactagctgtgagtcatatatgtgggatcaaggtgttaggcaagataggaaagcagtctttggacacataaatctataagcaaggtcgacaccaagatggccaggacccttgcctcttaccttggtctcaagagtgtattagctctctgcccttggatatttcattccctcctcttccttcatgtgactttgcttccccttattcccagtggggcttgagccactctctgtcattacaaggaggagtgctcttttgagagcagaaagctgacaaccctagtcatcgtactaggagttcctggagctttacctgttgaatatggacactgaggctgcctggcaactacagctcccagcggagatttatcacagaaaatgacctcagtccagagagcttccatggggactgtcatatgctatggcatggcgagcagcaggtttgggaaggacgttaacattatccagtgcttttcaggctcaaggtggggagtgaggcacgagcgaggctgctatctctctgactttgcagagaaggctaaagctctggaaggtcaactgggtcgcttaaggccacacaagcttaggcatgggtaagttaacatttgaatctgcattctttgagggtttctgtcacttcataccaaggggtatcaaatatagtcacttctattttgtaaaggagagaaaatacacagggagccagaataattacactgtcttaaccagaggctgagatcacaaaggccctgtagttttgccttcaggcaaaagtggggtcaagctgttgatttaaaatgaaaaaaatgaaattcttacatttctcttgagacgaggtacagaggtgctttttaaacaacatttcctcttcaaacatgcccgcaggaaatgcccgtgccagccatgcaggcctattaatggttaaagggcaagggtcacactgagatacagtggccctaaaataaagttatgaaaccgtatcagtctggcaaggagaaatgaaaggaaacacagaatgttctcagatacatagaaagggttttgtttcacaacttctctaaacaaattctaaaccttgtgtacttctaggaagccgggcagttagcgactaccctgctgctcgcagccagtgcgtagcatcgtcagagcatgacctgacttgtgagcctgctgctcctgagcaaacacgtgctttcctggtagtgattcttaatgtttctgctggaaggttgatggtgctctgagcactttagttgggaacatagattttattgagtgcctagtcagctgtgaccaagttacaaaggctacacatagagtcacgtaccagctctgatagggaaaagcaggcaagccatctaagagttatggcttctctgttagggtgagaactacaataaaagtaggccagggtacctgggagagttcaacaaagggtatccaagccagtgttggaagttcagcaaaatgttcctggctcaagtgttatctaaagcaaggccccaaagatggggagctagtggggtatgtcttagggttttactactatgcacaccatgaccaaggcaactcttataaagaacaacatttaattggggctggcttacaggcttagaagttcagtccattatcatcaaggtggaacatggcagcatccgggcaggcatggtgtaggaggagcttagagttctacatcttcatctggaggctgctagcagaagactgacttccaggcagctaggatgagggtcttaatgcccataaccacagtgacacacacactccaacaaggctatacttactccaacagggccacaccttctaatagtgccactccctgggtggagcatatacaaaccatcacagggtgttttgctttcctttcctgcagagaagagaatgtatgggaagggccagaagagaatatgtatgtctgggaagttgaaagggattctgtgtggctagtggagatggttgaatactcaggtagagacttgtcttatacactgtgttagagacttaaggatcatcagagatttaagaacgaggatacgatggtaacttacattttagaaagatcatgattctgggcatgtgtatcccagaaaccctgcagatttggagcatgagatacaggatgggaagaagaacaaaagcatgaggtggtagctgtggttcatactctagacggtcatggtctagtccaggtcatattgccagacatgagaaagaagaaagcggtctaagagctcccttaagaagtttatcagatcaacaagactctgtgttggattcagtatgagggttatatagggaagtggtccaggatgcacgcggtacccaggtttctgggatgttgatgagatcagtatcttagttactgagcactgcagaagaaacagatatttttgagaagtgttagggagttgtatattagctgttctcttgttactgtaaaagaaaaaaattgcaatgaaaggaacttaaggaaaagttctaaggagtagagttcataatggcagagaaggcatgccagctagagcaagatggtcacactgtgtacacagtaaagaagtaagggctggtttctgttccttagcttgcttcctcttttgcaatcatccagcccagtgctactcacagtcaagtgacatcattcttgcccagctaaacctttctggaaacactctccgacacataagcacagaggtatgcttatatggcgattccagccaaggtggcattgaagcttaaccatcacaaatccaatttggcaaatgatgctggaaacatgtagggtgaccagatggagttcttttcataagattgtattggccatggacccaaacttctggccattcatgtgttgtgatataaaccatggcccaattatactcataggtgctaccagaaataatgtagcagtatggggagaggtctgtttagagatatctagataggagggtgacagccttctcctgctgatacaaggagtcagccctatggaaagcagaggtcactgggacttcagaccttgatctatttttgcttctcagccagaaaactctaagaaaaatcttaaataagattccaactcaagaaatccccaactaagtgatagcttggcattctatttttctaccttattatgattatggaaagcaatacattgcagtttttaaaaaaactgaaaatgaatgtttaatgtgtatcttatcctggaccagcgatgagaggtatgatcctctgctgatgctatgcagaggcaacgacccacaactgctagtcaggcaaactgagggatgccccatgctccacactagtggttctccacctgtgagtcgtggcccctttgggaagtcaaataaccctttcacaggggttacctaagaccattggaaaatgcagatatttacgttagaactccgaacagtagcaaaattacaggtatgaagtagcaatgaaaataattttatgtttggggatcaccagaacaggaggaactgtgttaagaggtcacgtcattaggcacctctgctctacagtgaactgtgttgctaaactgtgacactccataggccatgctagtaggaatatggaagacattggtgctaagggtattttgaactgtgcatacctggctctagaggtttcagtgaagaagaattttagtatgtgtcctaagagtgttcttgtggtatcttggtgaagaaagtggctttgttttgcctttgtttgaggggtctacctgagacaaaggtaaagagatttatattaattgcattgacaaaggaagtctcaaagaagcccagcagagactttgctcttattctatggtttagcctcatgaagagcattttgatcaagcatagcaagcttcaaaaggaaaagtacaaaatggaaaagaacaaaatgtatggttcaaagaataaaggggcagcaggaagtagaatggagctgaatcctgcattcaaggagataaacagattaagggagtgtcgacctcttggcaaggttccacacagctaagcttattgtttatgtgtttgcagttgaacaagggcactgcctgattatggttttcatttggacttttaatctggaatgaactacaatccagaaatggaggagacaggcttttgatctgcaccttgagggaatagtgaccatggaaagcttagggtacaggccttgaatcccaggagacagaggcaagcagatctctgagttcaagatcagtctctaaagcaagttccaaaatagccaagcttaggtagtaaaggagctggaaaacagaaagctggtgataatgtaacagaacaagggggtcaggttccatccccagcaaacaacagaccttggcagctttggccatgtagctctggctttagagtcaagaatagaaaggactactagaacaattgatgcttgttggctggagctaagaaattagcagtgattaagaagagaccaacatcattgatctgagaagtaacatttggggggacctaaggaagctgtgttccaggggatagccaaggtgccttgtgcttcagctggagtcggtaagagtcacccaggtgatactggttttgaaggcataaaggggtcgtggagagcagctgaggcatgtcattgtgaaaggccaaggaaggccactggtgaagaggcccaggactgaagggatcatgcaaagaagttgaggcttggcaccatgaaggtagtctatgagaggcgatgggtgaagcttagatgcagtgaaaaaccccatgtattagagatgccagtaccatagaatgactacaaagaacagcagcagtagcgacatggagccaaccagagcctagagtgctacagagggcagagctaggcaagagagccaagtcctttggaggagcccaaaagatcatgtgtggatcccagacattgtaacaagaagctgtgaagtcaaagttgccttggagaccccaaggtgttagagacgtcaaagccatgggatttctgctgaggaaagcggctaagtgggagtgaaaccagtgcaggaggaagaagtttgttgtagtcaacaaagatgagaggagttggagatttcaagagcactttgacatcagatgtggagatgaagaagttggagtttacccagctggtccaggatttcttcactgtgatgttttggtatggtaatgtatatcccgtgatgtttgaggtttgtcatctgttttttgattttgactttataggagattacagctaagtgattgaataaatctcaaaaaagactttgaactttggactttgaacattgttgagactgctatagactaaggggacttttgaaattagactaaatatatttttgctgtatttatgtattgcccctgatattatcatgtctttgaataagcctctggaggccagggagtggaatgtggtcgtttgaatacactaggctcaggggtagcactattagtgaagtgtggccttgttgaagtaggtgtggccttgttggaggaagtgtgtcactgtggaggtgggttctgagtccctcctcccatttacatggggcatagtcttctgtttgcctttggaacaaggtgtagaactctcagctcccccagtaccatgcctgcctggacgctgccatgcttccagccatgatgataattgactgaacctctgaacctgtaagccagccacaattaaatgtttttcataagaggtaccttggtcatggtgtttcttcacagcaatggagactctaaaacacctcaaaataaacacacacacacacacacacacacacacacacacacacacaccaaaacaaagcatagaaaacatctcatcgtggtagctgtagtatctcacaatgtgtctcacagtgtattcctctgtccacacagcttcactcgcaaatattcactgcaaggagtcattggtctggtttgagcttctgtgacaccatcaatattggattctcaccaggactcccattgttgctctgcatcatgaagatcctgcagctttggaacagtaggtctggtcctttcacaaatcccaaccatttgcagacgatattgattttggggtgggccaacttagagccctggatctgggcctgggtggcagctgagctggtcagcaagctggctttcccttatctgcaccaccagggcaagctctctagcactgctctggctaggctaaccatcagtaggagacagggtcaactctcctggtctcatgccttcaggcagctcaccgtagcctttgccatcagggccagctccactgcattgcccaggtgaggtgcagggcccactctcctgaatgctatagctagcaagaggtcagggctagctctctcactcttatgcccttggagcccgctctcctggctactgcaaaggttcagggtcagggtcagagagggcatcacccctgcacctaagtcacgctcctgcagacaaatgacagaggcagctatcctgtgctctttacctcagggctggcttacctgtcctccccctgacccccaccagaggcagctctactgtgctgtccagatgaggtgccccacctgctgtccagagtgctgcagctggcacccacaccaccaggcaagggagggccagctctcccttgatcttgccctcagggctggctcacctgaggcccctctgatcgtcaacttgatgggatttagaatcatataggagacagacgaacttctgagcatgtctatgagggcattttctgagaggtgtagttgaggtgagaacgtgggcaacaccattccacaggctgcgttcccagtctgaggaaacaggagaaagagaagggaacgccaccattcacctctctgcttcacatctgtggctactgtcaccatctgccctgtactttggctgccatgtcttccccaccatggtggactggcccctcaaaatgtaagacaggatgaaaagtatttcatcacagagatgagcaaaacaagcaaaacagaagcaagccgaagacaggaaagagaaatcagaaagagaaatgaggatagcaagacaacaacagagcgggcggggtggggggaggaacagaaacagaaacattgacagaaacaggagcctgggagctgagccagcctctctgggtggtggggccctccctcacccctgtgggcacacccagggccattgaaacttcctggaactctttgatagtcagtaatttagtccacacctcccaggatggaagttagccaggttatttattagtcaagagatttggaaacattatttatgttttctgagcttcggattttcccctctgaagatgggagtaataggcacagaattgtgaggagttaaaggcgtaaatgctgaaagccttgaactttgctaagattgaatgcgttatcagcaagtgggaatgattattactgctgggtttagttgccagatacaacaaatagagagagaaaatagataatccctctaatcaattactaaacacatttctcacggtgagactcatattcgagtttttaaagattagtttaaatgtagattattttttttatcagaatctcccaattttaaaaatgtttgtaagtacttaaaatctctctgtctctgtctctgtctctctgtctctctgtctctctgtctctctctctctctctctcacacacacacacacacacagagtaaataaatgttaaaaaaaatattgaaacagaacaacacaaaggcctctgattgtatcacttcccagctgttctagaagaatctctggcacagatattgtctttattttaaaacccgtattctgttcatctccggtctctctggtacttctcttttttaaagctctggattataataacatcagttatcctgattcctgaggtttggtatcctgtcaagtctgtgccctcgatcccagttctcgagttctggcctaaggggttaaccctgtagcaggaaaccagtccaccctccctgccgcctctcccagctgccagaggggcagcagtcactccccctagagcaggtgggtgcttgcggaacgcagaccagcttctatagccaaagggaacagtatctaccaggggatactgttaagaaaccaatctaccaagggaggaagaacacattccaaagacggtcaggaattatttctagaatatttattttcttaagttcttggcacttccgcctcctcttctttgctaaggaaatgcacaggctgctttccaggggatgtctgtcagtagcagccctcccagttcacagacagcctttcctctttgttctgccgcaaaaggcacagggaagccattcaaaggagctctgcctcagaggagaagctggtttccctgaagtatctctgctctggggcttcggagtatgacccaatcaaaattaaccaactcatcctaatataaggcagaagctgatggggcagtctacttttcagtctcaaaatctacggcctttttggtgtacccatttcactgacctgccttgtggggactttctgatggcacaagccaacggctgtgaatgtacccatgctgatactttgaatgttagagattttgttcaccatggattttagaaactaagttttacttaaatgatttacattaaaatattatttgattcctgaattgatttggcaccccaggctgtatctcctttgtctctttgtctcactctaccggccctacagcaagaaactactgagaggccagcctgtgcaagctggccacagtgctcccagctgcctgccttctctgactcttgtgctcactgttctgttcccccaggtcttccaggaagcctgactgatcagaatggcccagagagaacaggtgagtacccaagtgggtacagggacaagacacccttgcttgcttttttgccagaggggtcaatgatgctacagtagactggctcttgccctactgctttgagtgaattagcataacgaagctcttttctgggaaggggactcttcaggacctaacttccatggatcccccctcatcagcctttagggaaacagaaggaacattttgatcaaggtttttcttagaaaagccctccgtggacctgttatgggaaatgaagctggttttgttttctttgattaatcacagtgccctgtttccaaaagcaaatgtggccttgcgtcctcctaggcacaggctgtgctgtgaaggagagggcttgaagctgtccccaggacccacgcagccttgttttcttcatcctgtacgctctgcggagttcaggttactcccttttttcctttgtgatttctgcccagtagaaccagatctttaaagatttctttacagttccttgaaagctggagtggagaagccagctgtgaattatataacagcaaggtcattttttaaagcaacagtggcttcctatataggcaaggggtatttcccagccagtttctaagtataaagaaaagcctatgaattttgtgaagaaaaatcaaggagattctatctacggtcccacccctactgtcctctctcactactttggtcaggaaaagataattcctaagatgatggtgggggggggtggttgggggggcgtgtatggggagggcgggatggggatggggagtgtgggtgcaagtggttatgacaagatgaccaaaacaactactaaagcaaccaaaagcctcccaaagcctttttgaagaaagacgggggtgggggtggggattttgttctctttcttcaggtggacagagagccattattcttgttcaaagtcacaataaaagcagagaagagggggagaaagctgtctaaagtatatctttgttttcacttaagagtcagggagctttataaatagccagcctggctttttctttcaggggagccccacgcttcaatttaagctctgcagaagcctcagctgctttcctttctttgtctgtagactaaacatccctccgaagtgcagccccctctctggcatcacccaggggccctgctccttgactctagatagtgatttttcaatgaagggcaattttgccttctaagaggacattctgcaacatctggtgtgtgtgtgtgtgtgtgtgtgtgtgtctgtctgtctgtctgtctgtctgtctgtgtcctgtctccaaaagcaaacatggattgtcagaaggagcatagcttatgcagtgaaggacagtgcttgaagcacagtccccagtatcctctcagccctgtcatcagagacctgctcttcagcctgcaccttccaggtagttcaggttagtctttttttctttgtgtttttctgccagtaggaacatgctgccagcatgttagtagaagtagactagggatgcttacatatgacccccaacacacaaatggattgttgaaaatgcatgtagtgctgaccctgagaaacctcggtccacaccatgccaggaaatcgagtggaaactctcagctttgaggattgctaagaatcaggctgccttgcagcaggcttggcctctctccaacggctgctgtgagagagtcaaagctgctgtaggaaatgccctctggctgtggtcaagggtcccccgtggagttgactatggggacacacagcaagcacatcgtctggacctggtgttttataatttatagtcacagggcgcctgtctccatttagcagcaagccacctggcaactgtcctgccagggaggaagcagttatgcagaggcctacagccccagtcagctgacagcccgtggtatatggagatgggagtgctcagaggcacctggaaatagacccgacatagatggctgagcacgaggtaccccttcagacccatccgtcagcagcaggccctgccagaggatggcctattgaacatttccaggaatagcaccaggagcctgtcaactgctttcttggaaatacactcaataaggatggctgtcctccagccggcagagcagaaagcctggcctggaccagaaatggcagctcctggaggcagccttccttaggaccttgagaatggggcatctgttcttttgggctgcttgtggaacttccatcagttgctggagtcactcagggtggaaagggacgttgagatggcctgcagaggctccaggtccagcttccttcagacagcttggtgcccttcacacgcataaaaatatcaacaggcaggaaggtgacaggttagatgacaagctcttgtcagcagtgagaattcacatcgcctggcagtgaacacctacacaccttctcttataaatttcacccctaaggacacccaaaggagctccagaaagggggttctttctttaaagcccccatcttccagtcattctgagaatatatcaaatatatagcaaaaatgaaagaaaaagcttacaatttaattgactcactcctactatatgcaaatcaaccttttctttcagggaggcctgatgtgtctgttggcatttggctaacctggaacctcccttgacctttggttcaggaagggcacatgtggtgtggttggactcaaagagctcctacagacccaggcatgggtgtcctgcatgaacaagagaccccaaactctctggaacattcaggaaatattgttcaatcctatttttttttcaatcctatcttttgaattgtgagagaattataaagtttatcatagagcattttatcttgaagggctacaagaaaacatttgatgcctacacagagccaccatgagctggggatcacagtgccagatactgaaattagacttgttttagataaacaagaaattgctttttgacgcatgtcccaaatatttgccatttagtccaaactcagatgaactgggcattgtttgttttgttaaatctggccatccatttggggaggaagagtgggctacttattaagttatgatgggaaacataaagaaaaaaagttaatagaaaaacatttcaggcaatcaaggaggaaggagaagggtattgagagagagggaaaaagagagagagactggaaagaagcagagacaggcagagtgagagaaatagagcactgaggagagagagatggggaggagagtctctgtggaggatatgaaggatctgggaaatgatgtctgcacagggtgccatctccctgggatgtgctcatgggttggctagcccctgctcctgcatcttctgatgtacttgtctggcaaaactcacagtggctgccagagagacatgagtctccaagctgcaactgcaccatttatatccatattaccacagattgggttgttcaagatactgacctcctgaaatggagtcctacaaatcagaccaggcctgaatggcacccccgaacccaataaaaagtgagttcccctaccacacggagactcataagcagagcctctctctgtctgagctggtctctgttttacccataaggaaagggactttgagtggcagttcccttcttagccctgatctgtatttctctactaaagcctgcctattcttaaatcactggagtcgtttctacggtggccccatttaagagttcccagatatttgtctgagtcatctgctgggtggagcttctcaaaggacatcttgctcctgtctgcaagcataacagagtatccttaataggcttaggagttagtgcttgcccctgggacaggtctcaagtagggctggttattggttgggcattccctcagtctctcctccattccccatgcctgtattacatgtaaacaggattcattttaggttgaaaattttgtgggtgggttgatgtccctatctctccaaaggggttcctgtctggctacagaaggtggccttttccggttccatatcaccaatgttgtgagtcacagctaaagtcaccctacactgcttcttgggcatatccctcatcccaggtctctgtcttgtcctagagatgccctgcacctcctcactctggtcagttgcagatttccattcattttcatggccatctctcctgtctttccccacacctgatcctgaatcccccattcccctccctatatccctccctcctagttcactccctccatcttcatcttatgactattttatacagatacccacagccaaacagtggacagagcttggggactcttatggaagaataacaaggattgcagactctgaaggggataggaattccacaggaagaccaacctggacccttggggctgtcagagtctgagccatcaaccaaagaacataaacaggctggacctaggtaggcctccccacacatatataccaggtgtgcagcttggtcttcatgtgagtccaaacaactggagagggtgctatcccaaaatctgttgcctatacataggttatgttctattagctgggctgccttttctggcttcagtgagagaggaagtgcctagccttgcagagacttgaagtgccagggtaaggggataacccagggcataaccatctgctcagagaagaaggggaggagggaggagggaggagggaaggattgtgggaggctgtggaggggcagtgagtaggatgtaaagtgaataagtaaaaaaaaaaaaaaattaaataaaaaaaatccagataaaagccagtgtgatctttaaattcctcttgccaaataatactctttgacagggtgagaccaaatattttagacccaatccaatagcagaacaaggcacccctctccactcccccccccccattcccacatggtgtggtcattagtagctcttcggttttcaaaggattggaatcggaacagtaaaatggactccgttgccacaatctcgtggaaacgttcttgttgttgacgatggttcagaatcactttgctagctgctttggcttcagggctgtcatcttgaggagcagaagccctggcatccaacagcagaggcttcttgagttgcgagcgcccttctcttttacccacagatggaggtcagggtggcctaaccccgaggaaggcttggcagctttctgagggtggagatgagaactgggccttctgacaaaaaaacgcctgtgcaggctgggcctgccagctgctgtgtcctgggaagaggctgcttttgcttaacccctgccatctgggtggcaaatgtcctcctcccaggtccctgaggactcacctttaaaggagattgcaggaccttcagtctctctctctctctctctctctctctctctctctctctctctctgtctgtctctccctccctccctcctctctttctccctccttcctttcccctcctcctccctccctttctctccctccctccccatcccatgctcccccacatgtgtgtgtgtgtgtgtgtgtgtgtgtgtgtgtgtgtgagagagagagagagagagagagagagagagagagagagagaggagagagagtctacactttcactaagtataatttctctcgtaccatccactcttttcttttgtttagagacagaatcttttctggtctggaactggacaagaaggctaagcgagttggctaacaagcctagggtagtgcttgtttctgctccccagccctgcgattacaactatttgccatcatgtccagctctttaaaaagtagattctgacatcaaactctggtctcttatgcttgcaaggcaagcaatttgtcatctgagctggctgtttaatccccaccttttcttcctttgcttcttagccatgggatgaatagtttgctctgctatccacacacctccaaggcaaaccagaaaccagatccggggcctaacagccatgggtctctctgataatgggttgaaactatgagccataccaaacctcttcattttatgagtcatttgttacatcgacagaactatgtcatgttagaccaggaagcaggcccttcctcaaatcccaggggagagcagaagagacactgtgggaagccacatgtgccattgcagggtggtgctggctaccgttggccatcatgcatacataggcagtaaagttttttgccaagatgaggttttgagaattaaccaatcggatgagagagaagttaaccaatcagatgagagagaagttaccaatcagatgtaggcatgcaaatgaggtggtaagcataacccatgcatagcaccagttctgggctggggtctctttgcttctgcaatcaagctctcccaataaatgtgtgcagaaggatcctgttgcagcatcgttcttgctggcgagtcagggcgagtgtaagaagacacataaaacatttcactatgcaaacaccctacttcagacactgaggactctcagatcagttacatacaacactattaggaaacagccaacatttactgagaaaccccttagcccgggcacaaacagttccccaatcagtctttaacacttcctacagagggtggatagtgtcactatttgctagcactattaagaattatagcaacattagtattattagagatactaaccgtcacataatttcagggacgcagagtaatgatttaagacattaagccgttgcctgttaagtcagttgataagcgaatgtgacagttgagattcatttccagccttccttgcctccagacaccttctgtgccctttgtgtcacagtgcaggtcccaaagcccagcggcactgctcaccacggacagggtcctgggagagtgacttcactcccctgtgtcttttcaccatgtgtagagagtgggtaggagcagtgtctcgatcagagtcgtataggatcagtgagtttttattagggagacttatcatcattaccagtgttatgattttacctatgtcaaaggagctgactgggcatggcagctgtcagcgttgtctggaggatacagaggacgaagagtcttcccttctcttcatccttcctatccctagtaagtcgttatttggctctgaggtagaccctccaagacggtcacctctagatcagcagggctgtatatggagcccagatcatgggagaatatgttcttcctttgtgtccatcgaggttcctcccactgaaatgtgtcctacaataataataacaacaacacctacagttgatagcatctcctaaggaaggcatcctgggtcaagctctgctctggtgctttccatattttggcttatctgatcctcgagcaatctcaagaggtagctaatgcaatcatccttacagacagctaaggaactcaggcacaggggcgcaaatttacttgttcaagggccaaaggtggctttgctgaagttcagaacacaacagtgtcacaacatgggtttgtgtagaagttaggtccagttcttcctcccaggcccaagctcccagaactaagactcagattcaaaatatatttacagatatcttggccatatagccagattctatgatgactaaggccataactaaaataaaccaattattttaacctatattctgcacattgcttattacctgtgctctatcccaaaattctctctgcctcccggatctcccacctcctatttcctgcttaagccatgggccataggctttttaattgacaggtgatgcatccatacaacatacaagatattctctcttcatatttgtatattctgccttctagctggatactctgtgttcatttcacaatctctgtggtttctgtgtgggtcattgcctgggcagtattcgtatatacttccactcatgaccaaggtgctagtacctcattaaatgtatcaagtactttctgtgaaagaattatccaggagactgaatttctccaagcttattctctatgtctgcttattggtaatgaatactagtctgggtctgtaggtgagataaacatggtgcagtaacagatacacccccagagttaagtgttctaccacagtgaagatttcatccagtagaaaccacagggaacttccttccaggtacccaggggtcctggatgtttccaccttgtgcctcatcaccacgtttccatggctacagtcaaatgagatgagcaaagtggagaggatgctcctactaacttccctggcctacgttatatacaccttcaatttcctcagtccactgaccagcagagtggtgagaccccaaccaaagcaggtaagaaaatgagggaacaaatcatagccccaggttaaaaagcaaatgttagaaacgttgttaacccagtgaaagaccccctttctggttaattatggctatttatctatttgatcaaggcatggttaatctatcttcattcaggaaatattttcctaatgtttctgctcccacaggcatcctcctccccgccccgccccccccccaacccggggatattagtgactaaaacaggaaaacaccaccacttcatggagtggcattctgttaacaagtagggaagaagtataattaccatagaaagaaacaaggacaagatggattgtgagctgataggtaaaatggtagaaaataaaacagtgaaagggaatcagtatgtatgtgagtctgtgtgtgtaactgtatgtttgcatctgtgtgagtgaatatgtgaatgtgtaaatgtgagtgcaaacggttgtgagtgtgaataaaaggagtattactgtgtaaatgtgtcaaggtgtagtgtttgtgcaagcatgtggaagtgtgtattactgtggtatgtgcacaagtgtgtaagactgtataagtgtgtataagtatgtctgatatgcatataaaagtatgtatatataatatttgtataagagtgtgtaagcctgtaaaagtatgtatgtctgtgcatgtatgtgtgtgttactctgtgtactcatgagtgtaaaaatgtataagtatgcgtgaatgtgtgcatgcatgtttattgtataagtttgtgtatgtttgtaagagtatgtgaatgtgtaacaagtgtatttgtatgtgcgtgtaatattcaagtgtatgtgtgtaagtgtcaatgtgaatgtgtatagaactgcataagtatttgtgtgtgagtatatgtatgtaaatgcatgtttatgtgtgtgttggtacatgtatctaaatgtgtgtgaatgtgtaagcaactgtaagtctgtgtgtgtgtgtgtgagttgtgtgtgaattgtgtgtgtatatgagttgtgtgtgtatgtatgagtatgtgtgtgtgtgtgtgtgtgtgtgtgtgtgtgtgtgtgtgtgtgaagcagttttaaacaggatggctagagcaggcctttctgggaaagtattattgaataaaggcccaaagaatacaagaacacagcagagctgggaaaaacaccatctgtgaggagtgtggaggtcctggggcagcatagcatctcccatattgaggacattagagagacttcagagcaaggtagtcagggccacagttgggaggatgatggggccctgtaagaacctctgccttcccatcctagtctcactcttaggagactggaaacctgaagttctagaaggatccggggtctgcagtctacatgcctatgtgtcctccaaagtcacatgtcgacacctatcctagtctgccagtatatatctgactgagtcctcatcaacttgtcttcactaaatattcattgaatgtggtaagtcctttgggacatgatagctcaaagagtagagccattctgagcagaagcagtgccatagaagaaatcccagagaggttggtgagacggttcagtggctgagagtacttactgttctcgtagaggacctgagttcagcatccacatcagacatctagtaccccagatacccctgacctcctggggtatagacacaactcaaaataagaaaaataaatctttaaaaaaggggggggggagaaacagaggaaggaaggaagaaaagaaggaagggaggaagggagggaagcaaggagggagggaggaagggagggagggagggagggagggagggagggagggagggtgggttccagagagcacattggcccttctaccaggtgaggatgaagagggaacaaccatctatggctagaaagagagcagtctccagacataggttcttccttgaccttggcctttccagccttcagacctgtgagtgtttggtgtttaacccaccaagggagggagttctgttacagagggagagagacatcaggtgacactgactcggggaccccattactctgggatacaagctccatcttttcaatgagattctcttgtcttagatgctgggtctcaaccccagggccttgcacgtgctaagcaagtgccatgcctctcaggtcctcctccagttcctgcttcatcttaggccttccgccttccctagaagaacctgctctaattcctgtgcatcctagctacataatttgcaaggccgaaagcaaaaccacaggcttggcatttgagctgtccttgctcaaaactcagagcagaaatgagcatttactaaactgtaaagactgtcgttgcaaaatattttactattaaaagttaataagaataaaatattagatcactacaaatattttgaatggaaaagaaatagtctgaggtcataattttgtgtaataagcaatacttttacattgttgtgttgatgtgagaggtcatatgatgttttttgggcttgttttcttgcttattcattcaaatggtcgtttgtgcttttagcaaatgaattttcaagtgatgttattgaaaacaatgccaattgcttttggcaaagggaaaatcacgtactttgagatacatttaactttgataataaaatccaacgcagttgttgctggaacaggtattatgatcacataggttgatgatgttggtgttgatttttggaaaattatttgaaatatgacttttagtaaatctagaggtgatgacactgatgaaactatgttctgaaagatttatttcctcttacaattcaacttcaaatattttggtatgaattagcaggttttctgatagattctaagacctgtgtgacttggaggggggggtctttgtagttttcatacaacttcgggtgtctttttatatactcagtggccatatcttcaggcataaggaaaatcaacttgtaggtgattttagttgataacttcaagttcctttgaaacactacattgagttattttcgttttgtcaaacagaactaccttcacatttgaattctatttctaagccggtagaaatatggtttgtattgtgccacagttttcaaaaccagaggttctcaacagttgaaaatagctgaggtaatctcacgacgcagctctgactattcgtagacttatgatcctcctgcctcagctcagcgagtcctggggttattattacaacacccctaatgtccattactggaatgttcttctgtgcactcttaaagttgtttaataatttattaaacaactttctacctgagcatcagctatcactgccctagtgttgactggagaggtagcatttgtccagacgccaaagggaaagtcgtgggatgttctgacaagctgtgtccaccacatgcctcaggctgctctgggagaatctcctcctctctcccacagctgttgccgctgaccctgcaactgctcctctcgctgctacacatcacctcagccccatgcctccccttgtcaatctttcaggtccccagtgctggggcttacatgtgggtactaagtcatgagtcagctatcactcactggccactggtatacttacaagctgagcttgcttgtggatggtagctttccattgctataaaaggatgtctgtggtggttaatttatcaagagaggagatttggagtttcttcctcatggctggttgccaccattactttggaccagacagcaggtaatagtggaaccatgtgccaggagtaaatatattctagcatatgtatccacagaacagcgtttattacagtcaaagtaagttaatgtaaccaacctctcattgtatgtgtatgtgacaagaatccattagactgctctcttaacagatttctagggtagactccaatatcatccactacagtctccacattggctcaccgggctcattcacccccaaacagggctcattcaccccataacagtgcagtgtcatacagattggccagtctctcctcatcctcctattcccctgttcccctgcctcactatctttgttttctcccttgcctgttttgtaataaagttttattgaaacatcattgttcgcttgttgcatactgtctgtctggggctgctgtgtgtcacagcagtagggctgaacagcgcaatgaggaatgtttggctcacaacacttgctgtgtgggactttacataacaggttcactgacatctctactagactataaaccccacaaaggcggggatcacatctgtctagtccacacttgtgttctcttctccaggcctagtgcctacaaggcatgtagagtgtgctcagtcaagctttgttgaagaaaaacaaaaaaggaacattaagtgtggtaaccacactaatatttttgaagtaatttattttcttaaaagagtcacataaaccttctgtttgactacactttaaaatgtctgtataagaaggatgctatctactgcgaaactgactctaggaaagtggcaggagtttgtcttttggcttcacaagtcctctggcacattgcccctgcaccagtctgaagagtgggcattgaacacataaaatcacaccactcaatatttactgagcagactggggccaggggtaagaacaaggtaacaatggttccaccatgactagcccatcagcacaaacagggatggaaagccacagggaaacagactcagggcctgtaacgtttgctagtacagatccagaactatctgagaaaaggtatcaagtgcaagggaatggtcctggagggagtgctgtgggtgttcagagcctggacatactcttcgtggctatagagggagaaaaagacttcagcccagaccctgtctggactcaagtccaagatgaggcttggaaagcttgtgttctgtaaaaggggtgttatcagccctgctttacagaatttttattatggagagctgataagacctgaagaatggattaagaggctagcaaaggattaggaggaattaaagaataacaatggtgtgatccaaggcacaaatacttaacacttgggaaagaacggatttgggagagattacgaatcatctgtagaccatggtgttaggaactctccaatttggaaaagtgtgatagcgggacacttgaacaggctgggtggggctgggcctggttttcagcacaaaaatgcatacgttcagaaaggtaggcaagaaaatcattccaaccagtaacatagtcaggtcttatggtgaactggaaccctattctggtcacctgaatagggaccagacttgggtttccgtcatattggatgcattccttgtgggatagctggtgcagtgggaccaacagcaacacctgaggcagagtggtaaggccaccatctctagatgttgctgagcatccagtaggtttcatagctggtctggtgaagtcactgagagatggggttttcagggagctaggcatgaaactaaacatgaagacttcaggctgaggaagccttgggaagatcttatacattccatgtgagtttatttgttatatgagatcaacaatctgcaaggatttttaaggcaaagaagccagagattatttatgaccaattttctcaacaagctctggaaagccaattcacagaatcactgatgttatttttttattgctgtcttttatggggactttactcatttcttagaggaacaactgtagaggaacaattggcatgaaagagggttgcttgtggtgaggttggtgtttcttgcctgccttgagagttctattgctgaggaaaacaaacaacatcccaaccctccatgacgcgactctttccagaaccttccatggacatcacatgttgtagatttgcaggggcctggagcttgcaacacatattccagggatgagttgatacagctcagttgtggaatcctctttgtgtaagagagagagagggagagagggagagagggagagagagagagggagagagggagagagggagagagagagagggagagggagagggagagggagagggagagggaaagagagagagagagagagagagagagagagagagagagagagagagagagagagagatcttgttgtgctttttgttttcttgggttttttgttgttgttgttgttttttaagctgatacttagaaacatcttctgatggagcagaaggctaagggactcactgatactgctcttcaagtctctgctgaggacaaacaggacatctctctgctgctctacccaagagagaacgtttatatatttctttatttaaccattaaagaagtgcctcaacactcaatgagtctctttcttatatgtatttaaattaaaagtaatgaagttgactttagtaaatgagagaggtatcccatatcctgttctctgacagttttcacatatgacataaagtgcattttaaaaaatgatttagttttactttatatgcaatggtgctttgcctacgtgtatgtctgtgtgagtgagtgcatcagatcctctgaatctggagctacagacagttgtgagctgccatgtgggtgctgagaattgaacccaggtcctctgggagagcagtcaatgctctcaactacttactcatctctctagcctctgtaatggtcttctgacaaccctgggctcccatgcagacccactggattggaatgctgactccagctcctggcatctgtgtgatctggcaagcttcctatattttataggcttccattttctcatctgagagatgaagataataatagtatctatttaaagattaaatgagaacatctccggagtggctagctcagtgcctggcatccactgcgccagctgtaactgttaggattatttattactgaaatcagggagctggaggtttgagagatggcacagcagctaggagcacatgctgctctcaaagacctgcatttgactcctagcacccacgtggtggctcacgaccatctgtaactccaattttaggtgatctaatggcctcttctgacctccttgggcactgcatgcatgttgcatgcttacattcatataggcaaaacactcaaacacataaagttaaaacaatctaaaatgagggagtttggggatgctatttgggtgggagatcctagtgttgtggcgaagcccctcctttgcactgtgaagaagtttctggagacagttgggatgtttactcagcaatgtgaatagacttaacttgactcaaaggtggtttaaaatgctaagctgtatgtcctgcatatattataagatgagttaatagattaaaattgaagttatttttaaaggaaaaagaaatctctaagagatttctattctccatgaagttcagccttgctaagacttttgtgaattgctttggggtgtcatcatttagactgtaaatgaaggtccttcaaggtccacgtgtaaacagttgggttgtcagtctgtggtaccagtgggagggggcagacaggtttggaagagaggccgggtggaaggaaggaggtaagccactgggtagggagtgtgtcctttaaggggattttgagaccctgcctttcccttcctctcattccttacccaccctggagtgagtacctcctccagcctgtggtcgtgtaatgatgcgctcctgcacagtgataggatgaggcaagccccccgaatgctctgaaacgaagatccaaactaaacctttcttccttgtaaattgtttgactcgggcattttcttatgacagtagaaagctgactagctgctgggtgaagccgctcagatgactgttatgctaatgtcctgtttacaggtgtagtagaatattattaatagtgtcaggaataggctatctctcgtaacataggactcaaattccactagtcattggttggtcgtttcttcattttccgttccctctttacccctgtacttttgttttgttggtttgtttgtttatttttgttgttgtttttttgttttgtttttgtttttgtttttgtttttttttttttgagacagggtttctctgtatagcattggctgtcctggaactcactctgtagaccaggctggcctcgaactcagaaatctgtcttccatgtactaggaagtgctgggtgtgttaccactgcccaccatacccggcgataacattcaggcaggaaaaattgttactagaaggtttgggaggggtagaaagaattagaaatttcaaccataaagtttcgacaagagatcatgttatcagattcacagtaactatctatctcttataagttgaccctaattagatattgtgatctcctctcgtcctatgggtatgacttgtctgtgtaataacctccattcctgatttttatacatacatcctccccatacttgatccctattaccctactataccccttttcccatgacagattcctacatttgctcatgccagatgtatgaaatattacatattttcagagaaatccaaacatcattccttggacattcactgatacttaccctctttgaatctgtcgattgtacgatggctatcctgtaccttaagactcatgtccacttatacagtaggtacatattacacttgtgtttacgcagatgcattctctgactcacaatgatactatcaaacacacatccaactgcctgcaagttacatgatgtcatagactttaaaactgagcaatatgagcattgcgcaaacgtaccatattgtgattatccatcctacagtgtagggatatctaggatactacacaggaactgcctatgataaaatagatgttgctgcggaacataaccggagccagtagtcctggtcggtcaggatggatccattgtctcgggtatacgacctgaaagagtggcatacgctgagctattgaaaagtaaaaactagatgcatgttttcctgagtaaccccgcccaacattggatttttcaatgnnnnnnnnnnnnnnnnnnnngtttaagtgtcaggaatagcctatctctcgttacataggactcaattccactagtctttggcttgtcgtttcgtcattgtgtccgttccctctgttacacctgtactttttgtttttgttggttttcttttgtttatttttgtttgttgttttctttttgtttttggtttttgtttttttgtttttgtttttttttttttttgagaacagggtttctctgtataagcatttgctgtccttggaactcacttctggtagatcagcctgtccctcgtacctcagaaaatctgtcctttccatgtattaggatttaaaggtatgtgtttacccacctgccccaggctttacctcctggtattttcttgtaagccgggtaaattgtttagttgtaggtttttttggctgggttgggtaaccccccatcccgcccattcaaggaagtctttccctgggctaccccatggttcaaatatccccctatgcttaagaatctttagcttagttttcacccctctatagaattccttgtggagtttcttatttggtccctaaaggttctagctgtctcccgggaataacccccattcggttcttttctacatcctccccatactgatccctcttaccttctcaccccctttcccatccagtgccctccctctgttcatcccagatgtctgtttattctcattttcagtgagattcagcatcctcccttggaccttcgttgttacttagcttctttggatctgtggattgtacgatggttatcctgtaccttatggctaatgtccacttataagtaagtacatatcacaattgtctttctgggtctggattgtctcactcaggatgatattatcaagttccatccatttgcctgcaagtttcatgatgtcattgtttttaaaactgagtaatattccattgtgtaaatgttccatattttctttatccattcttcagtggagggatatctaggttgtttccagattctggctatgaaaaataaagttgttgtgaacatagttgagcaagtgtccttgtggtatggtggatcatctttcgggtatatgctcaagagtggtatagctgggtcttgaggtaaaactagtccatgtttctgagaaaccaccaaattgatttccaaagcagagacacacagccaaacattatgctgagctcagggaatcttgtggaagaggacaaagaaggatctaaagagtcagagaggtcaagggcaccaccagaaaacctacagaatcaactaccttgggcccacaggggctcacagaaactgaaccaccaagcagagagcacacatgggacagaccttgtccccttatacatatgaacagcttggtcctcatgtgggacctcaaacagcaggagtaggggctgtctgtgactctgttgcctggctttggatccctttcccctaactggatggccttgtctaacttcagtagaagaagatgctctcagtaccactacaacttgatataccaagacaggctgctatccatgggaggcctccacttctctgaggagaaaagagcatagggggaggggaggtgaaaggagaggaggaagtggaagctctatccaggatataaagtaaataaattaattaaggaagaaaaagaattttccaaagcaagatacagcttaataaaaataattttagtatatacatatattaaatacatgtatgcccttatatatttatatataaattttatatataatagtatataaaattatatatataatgtgtcaacaggggagggaaggaaaggatttgcaggaggagaggagaatggggaagggagggaggactcagggatagaggaggcctgttgacctttgctttctgttgatacagttgctggtgcctctagatgaaaactgacccagctctgtccaccttttccttctagagttatagcacatgccaggaatggcaactgagaacttgagttccaaggataagactgaattctctaagtatgttttttttttcccatttaatgacttttcttctcatgcccttcctcttctctgagcccactctttatcacaaaaagaaagtgcttcttcagtggtggccaaagaaatttccattaaaaataggaacatcttttctcatggctgcctccaatttgctggtccttgaatgtgttcctggagagaaaccgaaggcctaagatgagcctcactcaagcctgcccctttgtgtgaaagggcttctaacactgggtatgtcccacattccttacattgccctggatcccctcaaggataggagagggccctggcattcagagaatctaataccacaaatctgatgtatcctcagggagatcagaactgggaaaaaacatgatcagaatgggttgccaataagccatcttttcagcaatccattgaaaaagtgtgcttcatctactagtgaaactgagaaaacatggacatcaaaataaatagtgatggcttgggttagggatgcaccttacttgaagagtgtttacctatcacacacaaatctccatgttctaggcccactaccacataaattgggtgtggtggtgcatgtctataatcctagcatttgggaagcagaggtaggaggatcagttgttcaaaatcatctttagctatgtagtgagttgaaggaaagcctgggatacacaagactgtctcaaaaaaatttaaataaataaagagataacaacagaagcacaatataacccactgaatataaagcaggaagtcatgagtccacatagctaaatgactaagtagaaattcacataaaaagatatttatatactttaaactacctcccccatatacttagtatttacaaaaaaacaaccacaactctaacagatgcatccttctgcaagagattaaaagagcatggccagctgaactcatggttcatctgacaggatgcagcaagaggaccccagcatgatcctggtgccatgccctgctgacaatgaatgacctgactgtagttatatgaaacacagaaagtctcaaatggaggatcattttacaacataaatgaccttcaaaggagtcaggatcataaaagacaaagaaagacctagaaaatttgaaaatgagagaggaaaaagacagaaaaccaatcataaacaatgtcattacagattcttttaactatgaagaatggacattatcgggacaactggtatacctcatatggggtccaaagtgtagacagtggagatatatgcaggatggcacactcatctgtaggactcacacaatgaaatgttcaggggtgactggatgtcatagcagcaacttcatatctaataatttaagaaaaaattctgttggctgagctttctgttttttaataaggaaggaaggtagggatagagggagagtaggaaggaaggatggaataaaaggaatagaaagaaggcactatcacaatgagcttcattcagatggtcctagcttcaagccttgggttcttcttgaacttgaggagcctctttaaagattcctgtaggaatatgtatccagttacttttacattactgtgaagaaacatctttggcagtaacttacggggagaggtttactctggtacataggaagtgcagtccatcatggcagagaagacatagaaattgaggtggctatgtctgttttggtggtacaggttttatacctgttggtcagccaggaagcagagagcttgaatcagaaacagtattttcaagactaccctaagtgtaattagacgtttacacagtttcccaatagttcaaatcttagtatgatctgagtggaaactggtgggagcagaagggaaaagaagaggagaggggagatgaagaagtgtgagcatcacataaatgtttgtatttaatctgactactagagtagaaggatccatgatccttgataggaaatataagtgtgtgcacatactcctgtgtatagaaatggtaatcacatcatatgtacactttataaccttatctacttaatattttctgaacattcccccccccctttagaaacagggtctcattgtgtagtcctaagtggcttagaactatgtagaacttgtctatgtagaccaaactggccttgaactaacaaagacccacctgtctctgccacccacatgttggaattactaaaggatgtggtaccatacccggtgacacagtattccaaaggttagttaataaatagccattggttgtgaatcacactaatttatttaaccacccccagccatggtttggtttaacattcctgttatgccatctagcctttagaaattggcatatattagcttcactatgaaagcaaaaatggaaaaccatgtaagataatttccagtacaccttttaccgtttccacttgcccttggacagattgggctaagcagaggacgttttgggaaatagtaaatatcgtcttcttgaactgatgaactaaattcttttcttttcttcctttcttcctttcttcctatttgttcgacggtagatgactctactggagactgaaattagggcatcatgcatgcaagaaaaagactctacactgacctgtggccccagccctcaatttcactgagttcaaatcccaattctcttctcagaaatctaggacctggtacctaatatctcaatgcctcggtttcccctcatataagatggcgtgcccattcacagagtcactgaaagcctgacaagttgtaaagagctcatacaaggcgagtgttcatcagtgttggccattgttagcattatgaaaaaatataagaggcagcttttgaggtccaaagaaaaagacaggaagtaggtcagccccatccctgggatgggaaagttccctctcctggtgacagaagtgatattgatggaaaaaacattttgtaaggtctggagttgacgtatactctttatgacattttaatctctgagtaatagattccatcgcctacggagccaggccatttccatttattgacttttcctcttctctctcagacatggagtctacctcctgttgactccattctccctccagccaccaggaactgtttctggacaatgctcaccaccatgccagccaggtctaaaacaggcaaggggtcctgaaggcccaccaaggcaccccatattccttaaaaggatgctgaggaggccttaatcccccttctatccttacattttctcccagtgatatgccccagtgatatgctgggtatgactttgagattgatgtgttggtggcaatactttataatactattcaaggcacgatgctgtgattatgagcataacctggtgtttcagagcatgggaccccctgacatgttcacagactgcattgtgtatgtttaggtggtattttacttaattgagctggggaaaggaacttgagtagaagaacagggcacgaacaatgtcttagtttaagtgatattgatggaaaaaaaacatttgcaaggtctggagctgacgtatactctttatgacattttaatctctgagtaatagattctgagtagtagttattgcttcgatgagacaccacaagcaaagcaagttagagaggaaaggatgtatttggcttacacttccacatccataagccataagtgaaggaagtcgggataggaactcaaacagggcagccacctagcatatagaagccatagaggagtgctgcttactggttgctcagcctgctatcttataaaacctaggaccaccaaccaagggatggccccagacacaacagactgggccctcccccattaatcacttattaagaaaatgccctacaggcttgttgacagcctaatgttgtagcagcattttcttcattgagattcctccctctcaaatgacttcagcttgtgtcaagttgacaagaaactatccaccacaggcgcctatgacacacacttgctgggaatctcacagtatgactcaaggcaagctgagtgagggtgtgggccagcccttcctttcagaattaagggataatttatttcccctgggtccccagttagaaccccatttattggaaattcccactggattttccaattcctttccttttccaacattcggtgggtttctcttgttattttctccttggcttccggaaaccccctttcctggttccaattttntnttccaggaacccttattgggtttggaaggccattgggcaggaaaaccaaaccaccaggaaaaaaggaaaggaaggaagggttcttccaatcccaaagggaattggcaagtttgttaagaacaggggggcgggcaccacactcatggccatttttttttttaacctccagctgagagcattgattggaccattagccaaggagctgtgggatttcacagggtctgcccaccctggttcaggcctggtttagtcaccataagcttcacatggcagagaaaaataaactcacctcgaagtttgattcagtcctgggaaaactgccgccagcacacctttggtgtcaaggtcgctccttatcttatcagtaaaaatcccctaaaactgctacgggaacttcggctccctgtcctcataacctggaggtgtagctttcttcatgctttgagaataaagataaaatgaattattaattttccagggcagcagcgggtgatgcttggtcaaggagtgaggaagacgagcagtcaaacttctatacatacggcagggaaaagtcatagaagcaggcggactggaggaagccagaggtggggagtttccagaacggctctcggaaggagcagtggcctttgtatagtgaacctccagctccaacttcttcctggattcacagccagagaagtcatgccgtgtggaagcctgctggtttctagaactccatagaacatctacctctgtctgggtgatttctggtaatcagcaaagcctggaaattttgaatcatctccatcagaaacagacaagctatcttcttttcagtacgggggaccaaactaagaaccctgtacaagctagacaaataatctctcgatgcagcacaccctcagatccctgccccacaactgtcttttctccctgctagtaaaactttccaatcaaaatcattttcccacaattaaaaaattataacttaatacatatacatggaaaaataagaaatcaagattaacttgtaattattaaaacagaataaggcaccagccagccttatttctgtctgagctggttccctttttctagaaaccatttctgtaaattataaagttttaaattccataatggttaccttctcattgatttaaaaaatgctgtacaaacttttgtagtttactatatttattctctacacactggcctactattaaagtgactctcactcactctttcctctgaggccccctacttcccaggatctatcattagcttcaatggggggcttttataatttaaaacctaccatggcgtttctattaatcttcctatgtaatatcttctgaaacaagattttgataacttatcaatgaaaattcaatattgagttgggagagcagggtgagatgcatgtgctgccacaaacctataatcccatggctcgtgaggccgaggctgcagaatgagggctagaagccatactaggttacataacacgttccagggtggcctcggttacagagtgagactctctcaaaaaacaagtcaaacaaaatatacacacaaagaagaaaaacaaacaaacaaacaaacaaacaacacacacacaccaagttgtaacctgtaatttagatatgaaggtcacaatgaaatggctagaaagagatttttggttttttgtggttttttttccagtaataatacaatctcaggggtcacagtatgagcgagcaaatgtcctgtaacaaaattatcttcatgtgtaggcatccactaaaggaagttttgaactttctctgattggtctgacaggcatgcaaatagcgattctgtagtctctgaaatattttgcattatagctgaatatgaaagaaaaaatgattaatttactccttaaaattttttattgtatttatttattggtgggggcatgccaaggtgcacactccaaggtcaaaggacagcttataagaattggttctctcctttgaccctgtgggtcctggagattaaactcaggtcatttggattgcatgccaagtgtctttatccactaagccatctcaccagtccaagagtaattagtgatcaaatattatgaacttatactaagttaccattatattatgaagtttatagatttcctattattgttgttattatatacatatgtgtgtatataatgtgtgtaataaaatgtcaaatgtaaatgtatgtattatgtacagtatactttgggaatgatcatgtgaaagatatttaagtttccaaaagcacacattttcccaaggatacttttcagccacgttcatgagccatctttgccactcagttgcgagaatctcagagagcttagccaccgccctgctgactgctaccgctctgcctctgcctggcaggtggacacgctccttggggtatcttgcaatgaaactgttccccacaggtccaggtgtttgaatatctgattcccagttggtggagctatttggataagtttagggtgtttggctttgctggaggaagtgtgtcacgagagaggagggcttggggtaggggttgaggtttcaaaagccatgtgtcattcacaggtcaataattacacaggtcaataattacattcacaggttaataattacagattaacttgtaattattaaaacagaataaggcaccagccagccttatttctgcctcgtgcctgtggttcaagatgtgagcccttagcttcagttctggatgccgtatttgcagcttacagccacataaggctcacaccatgacagactctttcccctctggaacatgagctaaataaatcttttcttccataagttgcgcactcatcatgccttattacaagaataggaaagaaactaacccctctacttcccgaggcccttcctgtacacatatctcctctctgagacattattaatagtcttactgcctccctagatcctggaggagaaatgtagtctcccctttcttgagtcctacaacgcacagctcctcacgatatccttccttattttacccctcaactttacatagatcacatggtacagaatgccccaggatattcagctaaggcttaagtacggttcagatattttccttgaatgctgaggatgtggctcagttgataaagtgcttgcctggcatgcacaaacccctgggtttgatacacaacagtatataaacatgatgatacatatctgagttcttctctgccaactgtttgtatgaagtcttactcaccaccccattctcttgccttggtacaggctgctgggtgtcagagccacctgcacttacagctcaaagctagaacgctgaccacagagtatctcagtacccaggggtcacacttaccagcatggaagaagtcccttgacttgactgccacacatttttttgtctagcagatcattaggacccccaggggtggatgaatctcccaccatatcctcagctgatggataatacccccatcacagaaaaaaaaaagaaagaacaaaaaacaaattgaaggagctttcttcttcctggtggtgctttccaaatctatcgttcaagctgtgaacgtatgctgtcactagtgtgtctcaaggtacctttgaaagcagtcagtagacactgctacactgctactttctcttttcagctgttcaaccctgctgcccagacaacattacaatgacctcatgtgaacagtggaagggccacgagatgaagggaaaggattccagctatgggttcagagcatctgtgcttttaaaactgtagcccctcctggctctgctcctagagatctcgctagcgccttgtgaatgtggtgaaatctacagatgtgtgtgtgtgggggggaggggggttcaaaaggcagagcgtagcttttccggagttaaaggtctgggctcctcctgctctgaaggtgggctgcatcttaagggagatgagaattagacataaagggttagtgtttactcacgacccatgaacttgggaatataaaggggctactgccttaacactccaacatgggggcgcaggagcctgaagggttatgtaaggagagaagaaggtgtgggctaggatctaagtcctcttctctgaaacactgcactgagtgtgtaaccccagggggcagctcttgcattctccttttgaattgttgtgctttgtgttacttaagacatagacccaaacatatgtttctatgaatctgaagaaaaacttaactgttaacatcttattcatcttcatggaactttttctcagaacttagaatgctctggaaaaagaaaggggatgtgaagaaacagggagatgagagcgggagaggagggagaagcaaaggaaactccaaggcccttcatcaggcttgctctgcttgcagccccacggagaggagcagctgtgctaagaggctcgtgtgtgtgtgtgtgtgtgtgtgtgtgtgtgtgtgtgtaagtgttgtgtatatgtgtgagagtgtgtgcatgtgtgtgtatgtatatgtgtgtgagtgtgcatatgtgagtatgtatgtttgtgtgtatgtgtgtgagtgtgtgtttgtgtgtctgtgtgtgagtatgcatgtgtgagtgtgtgtttgtgtgtatgtgggcatatatgtgagtgtgtgtatgtgtgtgagtgtgtgtatagatgtataaatctgtgtgtgagtgtgtagatgtgtgtgtatgtgtgagcatgtgtgagcatgtgtgtgagtgtgtagatgtgtgagcatgtgtgagcatgtgtgtgagtgtgtgtgtgagagagtttcttccttcttcctcagttttgcagcccagacttttgcccatctggatgcaaaccctgaagcttccaagcctccagacttggcctgaacccagaccaaagaagaatcccgttgtcttatatctgctctcacactcaggttggggatggatgaagaggactttcccttgagggtgatgagttcctggagagaaatacacttccgaaaagcaacgtcagcatgatttatgcaacagcccactgccaggcttctttcatttctctccaactctgaaacacaggctagaggttactgcttatcttccatcccagaaggagactctgatcagaggagagcttggtattatgccaggatctgaattggaaaccacagccttgagacgatgccaactgggccaattaagaaggtgttgacgacgcttcccaggaacgggtttctagatattttaactttgatggaaaagtttaagcttctaaaaatccccaagaacctcatattttccagggactagtgcctggactcttaaaggcttccaagaaaacaggattctcagaagccctttcgaccttcaagctcactggaccaatcaagaagtatatggaaaaacaaaagcaaagaaaaccaggccttctcatacaccctgagagacttagatgagttaagtgtttgaagaaaaagcttgctgccaattaggacagtgtactggctttgagaagtgagcctcatcctgttctccccacttttggctgccaggtatggcaaggttggtcagcaacaatgtcagcataaggggccaagattagcactgcctccccctggaatgttctcagaattctggcacgcttactaaccttcttcaaaactggcatacactggtaattacaatctaaaatgcaaatgcccataaactctgtgatcttactgcaaaccctgcaatgtggctctcacgtctgtcttggagacaagaaagctaagactccgaggaatcaagaaattcgtgggaagttcagttgcaccaagaagttcatgggaagtatgaatcagacagacttgaacttgggtactcttatcaacacttgggagttcctaagaacaggtgaaggtgaggtcatgaccaacacggttggagagtcctgttgctcccagcattaacccttcagctactgggctccagtattgatggaatcctgcaatagagatcctcctctagggggagggaattccaacaaatagctcctgacaaatggcaaaggaaatggtgaaaaacagcaaagacatttaatcagcatatctatgacagtgagacaaaggagacctgcacccttatctctgttcctaggaatgctgatttaacctctcaggttatagcagaaagggacaaagggtggtgcaaataattacacataatatgtcttagtcaaatggtggttccagggctggagagatggctcagtggttaagagccccagctgctcttccagaggtcctgagttcaattcccagaccacatggtagctcacaaccatctgtgatgggatccgatgccctcttctggtgtgtctgaagatagatacactgtactcatacacataaataaataaatctttaaagaaaaatcgtggtcccgctgattatgaatctcagcattggttagacagggccttgttgcaagaagaaaagcattgattcctgactggtagatttgactctggtcacaaggactacttaattaaatgtgaggtgactgccgaagagaaggagtcaaagtaaaggtggcctatgcaaaatgggtccctagatggcaaggtttcctacctttacttatccatcgggcgtttgaggccaggcagggaagaagcgtcaatgctcttagcaaaggtagcctctaagtcgccggttctcaaccagtgccttgagaccccttggggagttgaatgaccttttcacagaagtcacctgtgacaactggaaaacacagatatttacattaagattcacaacagtagcaaaattacagttatggaatagcagaagaaaataatttcatggctggggggtcaccacaacatgaggaacagtcgtgaaagtcacaacattaggaaggctgagaaccactgggttaagtccttgcccccctgcagaagtctgggacagcagggagaaagcaggtgaggccttgagaacgtagctttttatcaacccatgaatcaaggcagccctgacacaagatggctgaaggctggagatgagtcccagtcgcaagtggatgaagggaggagtcagctctgcttcaaggcagcgtgaaactgttagaggaggatccattaggtcttccggacaacaacaggcaagcgagtgttgggtagaaggaaggatgtaaaaaggtgggagacatgaagccactgggacccaaactcatttactgtagcagaccgaagggtgaggtgcagggccgggaagtgggaggggagagacataataaatgggaacagaaaggtacccagaaaatgggcacctgaaatacatcttaaccgggaagctggataaagccatatatgctttggacatataaatactgaatgggtttttaaatcctaaagtataagcaatctatctttcaaataaaaatgttaagcaggcatcatgtgcagcagacactttccttgtacacacggaggtaaaccacatatgccccagcttgcctgcccactgggacagagtcacattggcacctcctggccactccatgctggccttgaattacaactacattttatcttctaacaatgttgcaagaattggacctttaaaaaaaaaaaaaagctacactgcttattcaagtgcctgacttctgcctacatgttctctggagcctttcctgggtttggatgttggttctttttcttggagacatgctatggaatctctgagaattaaatcatcactgagaatcaggcacacagttccactgtctctgatactgtcctacacctggattcccgatagcctaggatgaactcattcggatacccacatctgcaggacgggcacctgcagtcaatagggaaccataaaatgttgccattcctctgggggggtcaatgctccagcttagagggtttctttaggtcttcattcatgtcccacataagtccaaattatcctgatctcctgttaatgcagacttattatgaaccatgcagttacagcaataagggcaagcaagtacaaatcacacttaagccgtgcaaaatgtcctattctccacataaatatctggtgaattttattcttcactaatttgattgcttttgaaggaggacctccaaagtgtttcagcttagttcacaatacaagtgggacacatttttggggtaaaagggaatctgatcatgtgcctattgagagtgtgtgagagagtgtgagtatgtatgtgtgtgtttgtgtgtacgagtgagtgtgtatatgtaagtgtatgagtgtgtgtgagagagtgtgtctgtgtgagtgtgtgtgtgtctgtgtgtgagagagaatgtgtgagaatatatgtgagtatctgtgcttgcacaagaattcttctcatttttaacggtagtgacctacatttctttcaaagaggaaacataatacactggaagtagcccttgacggagtaccctgaggtttgaactctagtctcaactatgggcaccagaagcaaccttgctcctgcatggaacatctcttcacatactagacctttagctaccttatcttgagggcttaatgatctctcagaggtggtggtggtggggtttctcatttcctgtgcttaaagcgcattttcagttaatactgtagcagttgataacggaccttaggtacatttctgacgacaatataactgtatcccccagttactataaggtcacctccagttatggatccatacctggtaaacgactgctctcatattcataagtaacccagaacgggaggtttccctcagtgatctgtcattatccctattcccttgtcacacccatgtcctagagatggcactggggtcaagtctgtgtctgtatcctttaatgtcccatctgatatacaagcctggatgagatgagagctcaaatacaacccaaactggttttaaaataagttgggcagaaattaaagtagtcctcgtgtgcctttggttatttccttcaagggtgacatgtcctaaagaagtcagcctgatggttctcctggtccctgacttttctctcttatccctccatcttccgacataacatcatgatgtgaagtagccaagagagctcccaacaggagctagaccaaggtcacttgatcttggactaactcaggtgggggggggggcgccaaacaaacctccctttaaaaaaaacaaacaaggagcttctgatattttgttgtagcaactaaaaatgctctaatatttgtagagtgcttacttaacggagtcttaagactagattagttgaagaaaggactccttactgaagagaacatgggctgaggagcccctctgtaaggccctggagtctgcagggctataaaggagttgctagaggactgaacggaacagctcgggccgagtatgagaggccacgagagaagatccgttccttcctgtgtctaacacttacagggttttagaaggcggcatttaaagttcttttgtagtaggaagcaatggtttttaagtacttaaagatgattgctgtggagggcactgaggcatcgactctgttgtgttcctgtaaatcacttttcatttcctctaatagcctttccaagcatctgctgggttgttgttctaggccgagaaaatgacaaacaagtctggtgagtgcttaatacagattcagaccctttgtcaaagaacagttaggatcaaagctttccagaggcaagccgctaggagatcaaaggacatctttatcttgtgccttatggggtgtgactttaaacaccagaaattagacctttggagtccatgtatttaccatgaaaatgtgccttatttctagggaaacaaggtcctcagcgccctgtccacatttttcccaggaaatgggcaggtggaacaggcctgtgatcttccttttcttctctaatgagactcgtgcttcagagaagtgcgtttatgttgttccagatgtgtgctaaaacactccagacacagaagtgggtgggccaggcccctgccttcccggagaccgcgtggaaggaagtcaggcagttatggaaagtcccttgatctgtacggattgatactaagcgagggggcactgacctgggctcaacatacagcaagacctgtgggaatgagcatcatgggacaaggtgttagtgggtgaggtgggcagtggagcggtgtgtacgacccctacaggacaggagtggtactacaaggaagttagagtacagaatgcagagccatactgtcaagatgccaaggacccagagggactcctcagtcgagttacacaggcctcgtaagctgtgtcagaacttacttaaggagaatgggaaagcacctcaagactcttggtaagagattacgatgtagacactctacacctttgtaggaggagccactaacggcctcttgctagcgctcggggattggcttcttcaccaggttttgagagagttgcctagagcagggagtttagccagctgtgcccacgtgagtgtattgttgaaactacttgctacatagtgtcaacaggatgtctctgccgggagcctggtctttgggggaagactaggtcaatcctccctgccccccccctccacatctggtgaaatcaccagctcagggtgaagggcaacctagatgctgacttcttcccatcttagaatgttttcatcccgtcttgagcgtctactacaattccttgttttgttttgttttttgtttgtttgtttgtttgtttcttttcctgctgttgggggctgaacctgaccattctgggtgcagcaatcagaaatcttcaaagttaacgtagaatactttttttttttccttcttcgaaccgttctcgctcctcttcactcctattgaggttggattaaaagcaagggctgacagtaactgcgccgtacatgcgcagttgtctcacaagactattgttgaagaagaggctcatcgttaagtatgtggattcactggggtttaactggcacggttgctgtgtagtggtggttttgtatagatttcaaccaagtttctgtaaggatcagagttagagcataaagtgggagacaatctgtgtcccgtgttttaaaaaaaaaaaaaaggaaaggaaaggaaaggaaaggaaaggaaaagaaaaaacccagactcttaacaatgattcaacatacccactgaaggcaaatgttagtggcttactggaagacgttacgcatgaatgaattaccacagctcacatcacatctgtaggcataatgtctagccagactaaaaatgtcaagatacaagcctagcctaatccaccagtctcaggtccaagtaagagacactgtcccaaaaatcaaggtggagagtgactgaggaatgatctctggcacacacacacacacatacatgcacacacacacacatctgcgcttgccgcaggtccttcgagccggatgagacacgaacgacacggacaccaaatcgggttcacgcagcaactttacttagggctttttcttttacagctctcttccccagcagcttcttcttagggcaagggctctcttactctacttctactcacagcaagggctaaaacaactcctattacaacagcttctcttctactacctctacttacggcaagggctaaaactatcttcgcgccaactcacctccttctagctccaccccacctcatccaatcagaattcacacacacacacacacacacacacacacgcgcgcgcgcgcgcgctccaggcatgaactcaggtcgttcacagacaggctgacaggtcaccatcacgaggaacagtccagcctggcaggcagcccacgcatgcagcctcactgcgcatgctcgggcaacccaagaaacaagtgggtttcatgggacctgcggctgcaccggcttcccgcatgcgcttgtaaagatgtctgtctcctcactgaacccagaagcgtgattctaactctccataatctcatattaatggagaaggagacaacttaaatctgcaccagaaccaggcataataatgttcatacttgcaaacccagcagttccaggccagcctggctacatccagtgtgagactggactggatagtaacacaaactagttatccaagaggaaggagcctcagttgagaaaattccccccataagatcaggctgtaggtaagcctttagagtggtttcttaattagtgattgatgtgggagggctcagtccatatgggtggagccatccctgggctggtggtcctgggttctataagaaaacaggctgagcaagccatggggaccaagccaggaagcagcactcctccacagcctctgcatcagttcctgcctccaggttcctgccctgtttgagttcttgtcctgactttttttgataatgagtagcaataaggaagtataagttaaataaaccctttcctccccactttgctttttggtcatgttgtttctttgcagccatagtaaccctgaccaaggcaggaatctgcaccagggtcgtggggtgtggctgtgacagactgaccatgtggcttgggggaggattgtggaaagactttggaacctggtgcaaggaaagccattgagtgttcaatgcttggtgagctgctctgtaggagcttagaagataagaatgctgaagacaacgcagaagatgaacgcctgaagtttcaggtgggaatttaaagactcttctgggggaggggggcatgtgttattttgaattaagattctatggttccggttagctgaggctgaagagtcatccgtgatcaacaaagtgccagaactacgaaagaagagaccagcatcactggggtgaagtcttctggcaagtgttacctgagagcacacagaagctgccttccagaggagggtaaggttgtgtcggagtctccccagatgggactggttttgaagacatgaaggagtcatggagagaagctgaggtttggcactaggtggcagggctggagtccctgaagagaggccaggagaggctgttggtgaaagggcagcccagttgcagcaagagactctagcagtttgggagttggcagtgccatggatgactatcatgaagagcagcatccatggagtgaagcctagaaggcaaactgtgtgtctgtagagggtagagctgaagaagtgttccaagtcctttggaggagcccagagatggtgagtgaatcccagacattgggcattgtgttatttacactgctgaagtttggttttgctttgttcagattgtgactgtgcccccattcttccctcttgaagaaagtatttaacttaattttgatttttttaaaaggagcctgaaaagttaaaagactgagtttttaaaagattttggatgttttaaagagactgaacttctaatgtgtttaatttgtaaggaccatgggtcttttcaattttgtttgttttatattgttatatgaatattaaagtaccatttgggggaataaatgaggaaggaaaggttcttattaaaaagttatgtgaaagttatgtgtttgtgtatcaagttaaccaggggtcagtcatactagttagttctatgtcaagtgaacacaaactagagtcatcagagaggagagagcctcaactgagaaaatgcctccatgagatcaggctgtaggcaaggctgtagggaattttcttaattaattatcaatggaggtggagccagtccattgtggatggcaccatctctgggatggtggtccaaagtgctataagaactcaggctgagcaagccacaggaagcgagccagtaagcagcgcctcttcatggcctctgcatcagctcctgcctccaggttcctaccctgtttgagtccctgtcctgacttcttcaatgatgaacaaccgtttggaagagcaagacaaataaaccctttcctcccctgcttgctttttgatcatgggtttttcatcacagcaatagtgaccctaagatagacactcaaaatcaaaacaaaataaaacaaaacaacaacaacaacaaaaaccaacctgtacaaaacttctccctattcagagtcccctaagtgggcctctctcctatctttgttttaaggaacatggcatttaagtctaaagtcaaagcggctgttttgacatttactcagagtcttaacattatttcctatcatcccacctatggaagaggtgtgcttcattcattttttttttcttgctaacacaacttttttattacaggattttgcattcctatcccttctaggaagaagaaaatgtaagagaattttactttttctccactctcttgtagtttggatcttaaatgtccccccaaagaccatgagtttaaggcttgttcctcatccactactgggaaatagatggtagaggtgtggcctggtgggaggaaagttaggtcatcaggagtatgtccttgctggaaatagggacctaagccatttatatcattctcttctattcctacggctaagaggagaggggatttgctctatgacatgactcagcttgaagctcattaagcctttccgaaggcctaaagctacttggtaactactgactgacagatctggcttagcattcaaaagaacccctctgtccttttagcagtgtgtgtgtgtgtgtgtgtgtgtgtaactttctctacaggaatggagagctaacacactccaccaatcatggtcagaggcaagccctgcatagggtctgtcccagcagaacaataattgaggtgctcagctagttggaacagggctgacatcactgagaagggcttgctgcctgctgtgcatagaaactggtgttctctgcccggggttttgcaaaaagaaaaggtttaatttctacagcctgctggcaacaggctgcagactcagatctgcatccacaatctgtgtgggggtggggggtgaaatttgccagaggtaaaaagaggtaacaatgcttgttggatgaatgacaagcttgcagcctatcctttctggaagggtgtatgaagctgagctctgcacctgggacttttgaacatataaaatcattaaccacacaccacctgatttctcatatctattcctaaaaaacatctggtcccaaactatccacaccactagcaaaaggcctgaaggctttgcctggaaaaccacttaaagttaaggaatttattttgctgtgtgtctaggcctcagcttttttcgcccatggtgctcagccttgatggcttgtcccccctgggggctagcatctctccactggcagctgggcagcatgtgggtgtgtgcggtgtgtgtatgggggggtattgtccctccctgcctgcctccggccttcatctcttcctgcctcagagccctttcatggttcgttcttctttaaatatggccctttcattgcagaatgagccagagtggatttctttgtcttcaaagactcagcattaggactgtgaggggcttcaaacaggattctgttcttttttttaaagatgggggaaaaaccatccattccctttttataaattatgaagatagttggctaatcatgtttgaaatgtatcttgttgagatcatcagctggatggccgtgatgatgggtgactatggagtaaagggcggttactctcagggttcgcctctttattgctctaagtgctaggcatagcaggattcctttagagcttatcatgtttcaggactgtacatggggaaaaggacctctcctcttaatcatcaccaatgtcattttctttctctctctctctctctctctttctttctttctttctttctttctttcaaaatgtatttatttcatttctatgagtacactgtatctgtctttcaacacaccagaagagggcatcagatcccattacagatggttgtgagccaccatgtggttgctgggaattgaactcaggacctctggaagagcattcagcccattctcctaactgccaagccatctctccagcccaccaatgtcgttttcaagcgctaccaagggagttttgcttaggcaaatgtagttaaagtgattcctttacctgtctaaaggtgatcagagctatgtaggtaaatggccggcctcccaaaggtaaatggccacagcagaagacaaaacaagcctcacttgactatttgcttggaggagagcatccaaagaggattggaaattcagttcccaagctctgtaaaagaaagtctcacagacattcatcaataggcaatagtaaggaaggagacgatacacgagtgtcacagtgagccccatggacagcttcattattgaagaaaatttgcattgggcacgtagcaaatagaggcacaaagacaccaacacataagagaatgcagtggttttataggcagggaaagagaagatcccaattcaaaaatgctgaggttgcctggaatcttcaggattggatccctgaaaggaagaagacgccaaattatgagttgaggtctccttgagtaactggctgggacctaaaatacatatgttagggcaagatgcccagagatctcacgtggtgactgctggagtgagatgaaccatgagtctagaaacatttcagttctgacagaacacaaagatcttacctaaaacaaacaaataaaacctcaatgcatggcaatgagcagagattctataggactaaatgtgaggagttagcagtgcctgcgtccagatacaaacgtttatctagcaccctgtcataactatgttaattattcattattgttacattattgaacaacaattcattattgttgttgttgttgagtagtatatatactactgtgtgtgtatgtgtgtatatatatatggacatatatatatatatatagtatatatactactatatatactactgtagaaagtgctcatcaatatctcttatacatgaatgaatgaatgaatgaatgaataagctaaatgattttgtacattaggaaattaaagtcaaaaccactgtgttttgcattctgcagaatggatacacaaagttggccttaagtaatagctcccttccagagaccgtaaacatggaatctcctagagattgaaaactattattctacatgtaattataaaccaaatggcatttaatttatctttcttcctggctggggtgctacacattataaaaatttccagaaaaggaatggcgggcaggagcaaagtttcctttgatgtcgtaatggctgatgttgactgtcaacttgaggggatgcggagtaaccacaggaacacctgcctcatctgtgtacattcctgtgtgcaacaaccgcaggaatagctgctaggtctgtctgtgtggaagcatctagatggagttaattggagtaagaagaaccaccctaaacttggatggcaccactccagagctaagggtcctgaattgagtaagaaagggagagtgtctccactgggctgtggacctggcttggtggctaagaagacatactgctcttgtaggtcctaaaattagaattgggctgctcacaaccacctgtgagtccagctgcaaggaatccaaatcctctgatccctctccccctccccctccctctccctccttcttccccctcccctctctctctcatacacacacataaacacggtggggggggggttctcaattaaaagtaaaatcctttttaaaaagaggagagactaaagtttctactctctgattttagatgcagtgtgaccagctgacacaaagctcctacttaaacagtgagccagaatcaactttttcttcctttggtcgttggctttcatctggcattctagcccagcaacaatcaaaggaattaatgcaaatattacctttcaaatgtttgagatctacttctcaaccctgccttcccagaagtcaatggcccacaggagtgagtctgtcttcttgtggggaataagaaagggaagctggcccttcagagtttgtgcctttgtatgcacctgtaatgttgcaaaagtaatcaccgttgcttaaaagacctccactgtttgctaagtactatggtaagttcttggctttcaattcatttactcctcactgcagcctttaaagtaccctgatattcctctctctcatgggatggaaaacctgggatcagggttaagttacttgcttatgagtcacatactgaacatgattcaagcaggactctaccctaaacctctcctctgggactcttcaacccatgggcctcatgagagcatttcttttctgacatataaggcaattgcttctcattttaaatttcttgaaagtactctatgtcttggataactttagttttttgctttcttttaaattttatttaatttttatgttatacaaaatgaaaaaaaatagggggttggagagatggctcatgaattgagaccacttattacttttctagaagatctgagtctggttcccagcacccaagtcagggcagctcacaactgcttatgactccagctccaaaggatctgacatctctgtcctcctcaggcatccaaattcatgtccatatgcctacatgtacatacatcacacaatctaaaataataaaaacatattcttaagagtaaatgattaaatccaccccatccccccaatatttcctctcaatttgctttttttttttcaaccaccaaatctactgtgttttatgtcttctgtgttttatgagcatgagtgtggggccatctactggagcatggatagttgctcagaggccacatctctgaagcaaactgactctcctgcctccagcagtcatggattcccatagctcctcacctaagggtggaatttggtgactttctccaccatttgtactgtgatcttgtctggcttgatttgaatgggtctcatgcatgcatgctgtcatagctgctgggagcccatgtgcataactgacctctcctgtttcccaaattctgtttcactgcagtcaccaactgtctctggctcttacagtctctccacccaacccttcctcaatgatccctgagcctcatggagaggggagcagtattaatatcttgtttaggcttgatgactttaatcatgcatatttttattaataccactaagggctttctcccttttgaaacacggtccttctgccatgaaattgagaagagtgagtctgcataatagttttactggaggccttgcaaattgtgggatttgggtaggatgcagaacttaagacccacattactgtagactacatgatgtcataaactggaagacataaactcatacatttatagattaagcctgctgtctacacttacataccttctcatggttttctccctcaatttgggaccttaaaaattcacaactcgtagtgagcatccatcatcagtagatgacctaaagaatgctcaaaatgctacttctgcctccgtttccgggggtagggcgaggtaattttacctttctgagtttccccagcctcttgggtggtgcatcctgaggctccagatgtctttcttggcttcaaggacgtttggtcttcactatcaacccatcccccaaattatataaacctgaaccatgctggctgacctcttgatatcacagctcaaccacagctggagactacaaaacattttgcagttactcttactagtggattacataatagacacatcctatctcagctacttgaatggggaatagagtccttccttgttctggctgttggcactgcttttttgctgtaatcttttgattttttgatagagatatgctggcagtcagtatgttcatatttttccaatggaagtcaagtgtgatcatttagtgctcctcaaatatgggttgttctgtactcagctggaattgccataagagtttatttaacttctgcagaattcagatattgttcaactctagccacagccaaggttctggctttcactttagttactctctgactgtcccctttggagacccctggctgcccttcccattcatctataaagattgactgccaaaactctgtggcattttagggattcttttttcaatttctctaagcttattgttaatctattatgtggtccatctcattgaccctctttaacccgatgatggtcgtttctaaagctgtgtcttactggaagcttttagggcttctcatttgatagagaagtttcaggcttggtactgtagtctttccctcataaatccccctgatctatttccctttgtctcaatgaccttctcagctgacatcacctttgggctggttgccttgagaaacgggagagattgggtatgacagcactaagcaagcatccttaaggcatggcgagttctaaagtaaccgaatctcaaggctgggtgggtacctggatattggttagtcctagatccctccccacacaagaatttgttcttgaatattcacagtccctctcctctgctagaatccttccaagcagagatcattagttggctgagccaactgttctcttgtttcaagttctaattgctagagttattcaattgaactctgctttcttcccattagttctaggtgtgctgttgggagcaatacaagttaagggttgatttcttagaagaccatactaactgctcttgtatgttggggtctctactgactgacttatacttagtcggggttcttgtagttgtaagtaataggaagcaactctggctaactatctcagctttctttgtccaaataagaactactccaaaacttggtgcctcaaagaaatgctcattgcctcacagatggtctgggccagaaatccagaagcaacttactaggtgattctgggccagggntgtctcataaggtttcagccaaaaatgtcctgctacagtcatctgaagcattgactgagagtgtggctccccttctgagctctctaccatcactaatggcagtaggtctcattgtcttttcagccattggccagagccatccttctttttcactttggtatatctccaacacagcaactggcctggtacaggctataagaaggacaggcaaggcagtccttgtatgacttaatctctgaactcggtaataaggctttctccctctctccctccctctctctctctctctctctctctctctctctctctctctcacacacacacacacacacacacacacacacacacacactttcattatttctttttccagtgttgaggattgaactcatagtctcatgaatgttaagaaggtactctaccattgaattaacatataccttactttttatatttagtttatagtaagtatacggtctctggaccagagccacaatgattatttggttagagactatttcagtagctgttccttgtgtctcattgatgcctaggaaggacatgggccaagacaggttgatcttgtgcaggcagaagagtctgttctacaagatggggattatcttacatctggaacatttattccagtacctatcacagaaaggagacaggacctacaacgtaaagtaatagtctctagggggaaataggaagtactctgtccagggttatgagtatatggccttggggaaggtaagatagattttataatagatgtcaattgcactagctgggcaggtgactgtgcacaactttaatctcagcactcagaaggcagaggcaagtggatctatgagtctgaggccagcctggtctacagagcgagttctaggacaaccaaggctatacagagaaaccctgtctcaaaaaaacaaaaacaaaatacaaccaaacaacaacaacaaaaaagaaatcaatgtctcccctaaggggtgtttaaagctctatgggatttgaggaacaaattattttctatactgaaagtctgatcctcctgcccctatttccaaagtgctgggatcacaggctcccactaaaatgcccagtctgatgcagggctgggattagacccagagcttcatgcattcaagaacagccctctgctgactcagctgcatcagagactgatacgcggtctttagagagtgtgtcagttcccactgctcagaaagaaagctctgctttgtagaaacatggggatagccgtagtgttttacagtacccacccctgttctttcttctttctgtttactagaagtaaggtactaggtcaacccacattcaaggcaaggtgattctgtttctacctcataaagcccaacaaaactaaaagagttatacaataaaaaataaaaataaaaagtagatatgtctaagccatcgcatgctacaaaaacaaacaaacaaaacaccaaaaaaattaccacacacaaacaacccatcccttaccatttgaatatgtaataaatatataaatgtatgcaatcccctttctccaggttcctgcaagggacaccctatgacatgtcatcttatcttacaaaatggccatctgcatgaagaccaggtgaccatggggtattttgtggtagctccttaaatacacatctacttaaacatccatcaactagagtaaaagctgtcttcttccctcccccaacacacacagcgagacaggcatgggctagccaaattagttgtttctgttcccaaagcaggaaaacaagaagctggtccttagcaacgttgagttccaactggcaagcgttacagctttgcagtccaatcggggaatgttagaaatggactggggctcatggtgaaggattagtctccataactcttcctcagggttcttagttcttagttcttccttttaaagacgtcctcccagacctggactcaattggtcacatttcagtgagtgcaaagccaaaccaagcccagccaagacatcacagagtggagaaaggtttgttaccagcagcaggcaagaaacacagagggtatatctaagttctgcctttctggaacaaaggcaggttggagagatccctcaagggaggctatagctgttcaaacagctttcatcctgtttctgagtatgcttagtttaaggttcgtttaaaagactgcagacattttggggcatgcttatctcatggaacacatgcttagaggattaacatgatgtcttggaatacccctgggcattgcaccataaattctcagctgtaaataaagaaatgacaccatgatagttaataattggctggacatggaagtgggcaagagatggctttcaaggaggctaaagatagcccatgataacgtgtctctgatctatgacatttgactctttggaagcacagagtttagacccctggccttgtagactcttcaacaaatgttcagcctctcctttttcctgggaacttatgtttataatagttaagatttatccagcacacatttcttcccatgttctttgagtcgggaactttagagccgactaaactttagaaccactttaggcgtttctgactcagatcattctctgaagttatagtgaagatgttggcggaaaagatgtaaggaacggtatgggatcaggacccccaagaccaagttctcagcatgaaggagatttatttgctccaaaaggacagaaggcagggaataagagagaaagacaggagatgggggatgaggaagaaagggaagggggcaaaggggaagcgggaaagatatttgccccagagggacaaaggactacctctggataaagaggagacagacatggcacacaggcaaatggaggtttatataggtaaagaggaaattccatgttaggatgaggtgtttaattttaattgggcatgttaattaggtgagccaaaggggtcttttgattgctagacttcaatacttctatagctggacctcagcagtcaccctcaggaggaggaagtggtccaataagggactagacccagatggctagccttaggaatataatctaacagtgtttagcaagggaatggggaagggtgaagcccgttggagccagactgaccatgctcaggctagtccagagtctcttcagacacttacagaaaatgcctctggatttggaaccctaacctcacagatggaattcaggtctgggaggagtctggctctccaagtggggaagtcctgcccttcaaaggcaaggggagctcctggggctaagactgtggttggagccagcaggttgcatgtgccgcggcacatgaatggctaagtctgtaagagaacattaggcttgaggctgggaaggagtaggcgcccactaacagctccatagctattagggattaatctaccacatcatacagcattcaaatcccccatcagctactgacctttctggctacgtagtgtttcactgaagtccttctgactgtgcggtatttaatgcctccagcacattccatccagttcagagaacagacgggttattaaatacacctagaaactctgcccaaggctcttgtttgtgggctgaatcaaacgaaaggaaattgtcaccacaagaacttgggtgaaaattgagtgctgtctctgaggttcatgagaatacatgtacttgaatcctctccctgtctagccctagatccttcagatgtggacatgggtgttcacacatccagcacagttaacatcatttgctctaagggttgccaaaacgctgataatatctctttcattcagagatgttttctattagaatagccctggaccgagctttaggcctgaatacatatgaccttattcctcttcaagataatttctgggaacctcaggcaagactgttagctttgtttacagtaaggacatcctaatgcctgcatccttggcatccagacattaaccttatccgttgtaatcccgtttggtgcccttgggacccacactgtaatttcatgtaagtttccttagtaagcctttaaggataatagctttaaaacccatggaaattgcttctaaggcaattttaagacaataaagtagggcttgctttttgagatgcccatactcatgtactagggtatgtctttcttaaccctcatattttaaaaatctatattaggctggagaacattgttcaagagcactttctgctctatcagaggttgtaggttgtagtccaagccctcacacgatgactcacaaccaatcccaggggatctgatgcccccagttggtgttctcatgtcccaacacacatgtggtacatagatataaatgaaagcctaacacccatagacatgaaataaaaataaaacctcccaaaatctatacaaaaaaaaatcatcccataaactctaactttgcttcatcctggctggtcctgaaattcccttctatatcaaattcaaggatctggtttgagtcgaggtccctaaaagatgaagagaactcctcgggctgctaagggcgatggcactgagatccctcctcaccagaactgacatctttgaatgtgctaagtcacaggcagaaaacgctcctctatcctagccacaacctttccgtagatccacgcgagtgttctgcgtgaccctgtgcactctccactccaggcctttctcagctttcctaggaaagctcctttcacgtccactgttcccttagaagttgcaattatgtcttgttattaataagctattttccttcaccagaataacaactttctctggggaaatctgttgcctattatgtatgtaacggagcccaatgcttggccaatgtgctggctagtttggtttggtttgtttggtttggtttggttttggtcaacttgacacaagctagagtcatccgaaaggagggtacctcaattgaaaaaaatacccctatgagatccacctgtagaacattttcttaattagtgattgatcgggggaaggtccagcccattgtgggtagtgctatcactgggctggtggtcctgggttctataagaatgcaggttgagcaagccatgatgagctagccagcatcaacccttcaaggcctctgtgtgaagctcctacctgcaggtaagtgcccttcttcagttcctgctctgtttgagctcctatcccgacttccttcagagatgcaccatggtgtggaagtgtgagccaagtaaaccctttcctcctgaacttccttctggtcattgtctttcatcacagcaacagtaacactgactgggacaggattgtggggtattgctgcggcagacctgaccatgttttggagaggatcgtggaaggacttttggaactttgggctggaaaagccattggctgttcaaagcttagtgagccactctatgggagcttggaaaactaagagtggtgagagaaatgtgggcgacagaggcctagtttgtgaatatccaaagggaagtttgggtagtaaagactctatcacagctgttccgcgtattttgtgttgagactctgtgattctagtcagctggggctgaagaatccgctgtgattaacaagagactggaaccaatcaaatgagacctttgcttactgggacaatggataactggtcagccggagctaagcaaagagcagatcgctgaggtgacatctggaaagtgttttctcaaagtccacagtcagaagctgtgttccagaggtggtcaagcttggacctcatgctggcagctggacttgacagtactggtttgaaggcgcgaagggctcataaaaagcagctgaggcttggcacagagagaggccactggagaaagtgcagactcagcacagttgaaggcccaggtttgaagaggtcaaggggagaagttgaggcttggcactgtgaagagagtcttctctctgttggtgtgcttcaccacagcaatagtaaccctgactagaacagccgataagtgccagccttttgacaattaattaattcacatttgcataatatgcaaaaaagttatttcttaggaaagaggatacccttctaggattaaattcatcactgcgaggaaaacatcggtaccatcgtgactgagttttctttctgtccccatgaagtttgatggtgttaagatttttcctctgtgaacaacgttcaaatgtctgaagacctgtgaacaattcttagggcaaagacgtcacctgggattgctgaattcattcacacaaaaaaagtcaagagccaagatttgggcctgaggtaagtttagaaataacaactgtggccagggctggacgagccattagtgtgctgagcacacgtggcaaatggctaagtcgagatgatcctacttcaagatcctgaattttattaggtcatcaaagactccataggaactctgcacttgccttacagcagttcattcattcaaggaccaggggagggtgtactgagatccctgccccacttaactggggagataatgtggcttggcaatcgggatattcaaaggacatctgtctgattggctctagacccttcggggaatttgctggggggtgggggtgggggagattcccagtgttgttcttttcctcctgtttcacggtccaagctgatgcaagctgtgtcccaccctttcttactacagcctcttagctttcagggagctattcagctcacagggatatacctgattcttctgtaaagtctatttcataacctctcataccctcctaccttccttcctccgtcttactgcatgttccatacggacttctggatcatgtttttatacaccatcttgactcacaaggataatcatttcccctggcattcaaggtgtctgttcccaagggctgtctttcaacagcggtgtccttgggcaatgaaacgaatttctgagtctctttgttctgatgtctgtgcttccttaatgaggtcatttaaaaagatcacacaagaatgtctgtccgtctgaacaggctaggccgacctgttaccacaacccccttaagactccacagcttctcttggtgctgtgtgctcacaacaaagtcccgagcttcacgctcaccaacaggtctgtggagcagcctttagctggaatgcatagcgcatgtgcaccaaggacagatgtaagaattgcctttatgtaaaaaccagttcctgtagggtatgtgtttagatcccaaccatgctgaatcataaaatctttcggtctcctagtttcatcatctggatgggtcactatataagtttactggagaaatcataacaaataatcataaacttgactacttaaaatagcataaatgctcacaatttctggaggtcagaagtatagggttaagatgctggcaggccctccatggctctaaaagagactgagctttgcttcttacagcatctagtggctatgacattccttgactattggtcccattgttccaacctctgacttataagatatttgtcagtgaagcatttagggcagatctggataaaccaggatgacctcatctcaagattgttaattacagctttaaagccctttctttgaaataatatcatagccataggttctaggaaataggacacaagaatatctttggagatcagcatttaacctactgcagttaccaggtgagtaggtaggtcactggatattatttaaaatgagattggctttatagataacctttttcttttagtgaccaaagacttaattgacatccaaatattaaggaacacacagctgccaaatttcccagtgacgtgctggttcacacatgtaccaagattgacatgttggtttgcacatgtgcacatatatgtaggactgacatgttggctcacacatgtgtacaagtatgtaggattgatgtgttggttcacacatgtgctatgtgtataggattgataccattgttccccctgaggttactttcagactatcaatgtctctatcatacaaatgaacactaaagtatgaaaactcggattttttcacatctgaccaaaatggaagaaggggaacttttccatgtaactctggactaaggctttctaggaaattctctggggcagtctgtacccaaaagacaaagtcattatgagagatgttccataagagtcgttttaattcctaagaagttttgcccatgattaattatgttttagaataagttatacttgcttctgggctttggggaagaattagatgtaattgggtgtctaggagggaaatgtcaacctagccttctccgctcttgttttgttctccctggctcttgataaaagttaatgaggcacacttttcctgttagcacacgtccctgctcttggtgtagaaatacactgatgctctatgccccttttctgtcatgtgatgaaggccgggcgactagaaagagtggtaatttgttgtcatggaaatgagctaacacaaagcattgggtttgaactttgcctggaaatccttgggaaaggtgagggagagggtaatacagctgtaccaccaagaagccactgtgctcagagagacggggtaaggtgctgggtgggcttttctatgcttcttcacacttgaatattctgagcctacactgatcatgaagaagtggccaagtccctgtgagcttttccctcccctgagtgcactgttcagtaggtttagcatccaggttctgcatttcttgggtaaatatgactccaaccttaataaaaagccttaacctggaggcatttttagcagctcactttactttccacagttacattagctgcagcttctaatgatgtcttgaataccttttcgatggccctaaatgacagagctgtcccccttgaccatatctggattattgatcctgactgtccctccccctccagcctttagatctcattcaatctggctagttatagtaagtcatccttgcagccatgatgaattgatccaaaggtgaactcgtgaggattaccaaaccaatcacggttatttctcagaacctttcagatgagaacttaaaaaaaaaggtagtttcattttggtggggtaggctggcctctggatatggtcatgtggatcatgtcttcaaagaaatcctgttaagagaataaatgtcatagaacaacagacaaaagatgtaaagaggagggggtgttgagatggcacaggagagggacacatactgtcaaacctggcgtctcgagtgctgtcccttaaacccacagagcaggagaggaagttttcctctgacatccacacatataaagtagcttgtcctaccccaaagtggtttaattataaagatggaaagctgctactggccacaaccaagtcctgagctgccttgtctccatggtccagcttcacttcccacagtcctgagatccacctccaacagacccccattgctggactccactgttgatgaatgggcttcttgagtcttagctgatgggttctctcacctttgctgactgggacgagagcactctcagtcaagttgttggcgtcttaggaagctaggggtttgtgtgaccaaaggaaggagtcacaaagcccttagaatacccttgtgttaacatgaggaggcagctcagtgctacagtgcttgcccagcatgtgtaaagccttgaggctaattcccagcaaaagacacacacacacacacacatacacacatacacatacacagagagagagagagagagagacagacagacagacagagagacagagagacagagagagagagagacagagacagagagagacagagacagagagagagacagagacagagacagagacagagacagagaaagagacagagagagagacagagagagagacagagagagagacagagagagagacagagagagacagagacagagagacagagagagagacagagagagagacagagagagagacagagagagagacagagagagagagacacagagagagagacacagagagagagacacagagagagacagagacagagagacagagacagagagacagagacagagagacagagacagagacagagagacagagagacagagtcatccatccttaccaggccaaagctggttattacactcgtgctggtaaaaaggctgaagcaggaaaatcaagagttcaagttcagcctgggatacagagcaatatgttgtgagcatgttattacagaaacatagatgacattgtgtctctccacaatgtcagaatgcattgagtaaaaatagattcacaaactatatcacttttgctgtttgcaatttgccaaataactcccagtttcacttggtagctggtagttggctatcacaggttcttacatcctactctttactattatactctatgatcacacattattctttatataagtatgtgtgtgtgtatgcatgtgtgtatgcatgcatgtatgtgtatgcatatatgtgtgtgtgtgtgtgtgtgtgtgtgtgtgtgtgtgtgagagagagagagagagagagagagagagagagagaagttaaggaagttgttgagttcataaaggttgtcctgaaattgagacagagagctaatacaggcacaagggaacgtctgtagcaggccatgtaagaagtcttggaagcatcaggcctaagagctgttcaagcataggtggtagatgccattttaagggtctaggcacatttggtgaaaaccaaaatttagttctttgattcttctggttacttgtctgaggaagatggagtcaaggagccgagccccctgctggatttgctgtgagggctttaatagaaaacaagagaatgatctggaaagctcttggaactggctgggccggagagggggaggggtagatccgacagccaatcatggaaatgggggaggagtcgaacgttggtcgtgcttgttagaaatctactcagtggaaaagtgagcttagtagatttataacatctgtcctaatgcatgggtatatctagaattcccattctgcctgaaagaatgtccttgtatggtgtgaacagggcaggaggttacatcttactgcgctgatagaaccttccaggtagtctaggtctatttcatctaacatcacattcagaaatcttcagttagatcttagcttcctctggggaacaatgtactgatccgcaggccttcaaatgctcatgtccttctgaaggtgctttctgcatgcagcgggcaagctgatatccccaccagcctcttgaatgtgattaacaggagcctgacttgaagatagataaattgctggcatgctgacaaggtcaggttttgactttgtctaatcatcagaacactggggttataaatttgtaagataataaataacaccaagactgcatcgttagctaagtcagccagccaatatttttgtagcagggtatgctgacatagctatctgactgagaaggcatactgaacttttctctcaggcgcattctcaagtacaggagctagctcttttgcagtcatctgtctgtctgtctgtctgttaagaattttccttctgttctctctttctttttagacagggcctcgctatgcagcacccatgggccggaatctcactttatagtccagactggccgttaattcgttgagatctacctccctctgactcccaaatgctgggatggaaagtgtacagcatcgtgctttgtcacattttgaacctgaatacaaccttgttggggaaaatcattatagcaaggtgaaaacattcaaggttggagataataccaaaagtgtcgaccgactggcgagatggctcatcggctgagatcactgactgctcttccagaggtcccgagttcagttcctagtaaccacatggtggctcatagccatctgtaatgaaatctgacgccctcttctggtgggtctgaagaaagcgacagtgtactcacataattttttttttcttaagtgttgatggaatgaatgtgggggggtccctgaaaaaaaatcatacctcatcggctgcctctcacaggagagaagtatgtgctctggagcccaacactagatttccatagaggccatactctgtcctaagcagggatcgagcccagtaagaatgagacagcctatcctaggagacagaggactcctctgatgtctgcctttggcctgagacttcccatcagtcttggcaaacctctgctggattgtacagtagtctataatgctcctgtctggtgtttctccccgattggcttcttggggttgcggtttgactgtgcttacttattaaagtttgccctggcatctgtttttcaaatgccccagatgagcaccatgaacaagccctgctgaaatcccaacacaacagagaagtagactcaaggtggggttctagaaaaccagagagctgatagttacccaggcatgatcagtgaaggagtgggatgcagggtttccccacgttagacaaggagcaacagcagggagcattttctggaatctagaggcttggggaatggattgctttataggagttagagagtttccataaggattgtagtgaagtggaaacgtaagagttcttcggaaagtcggttggatggtgttttgctggggcaaacatgtgaaggaatgtttagctgaagtggacacatgaaaaagaacgttctgctaaagcaagaaggtgaaaggacatatgatgaaggattcctcactagcaaagcatgtattggtccaccttcctttgtgtagttgagctgcatttgtcaagactccatagagagaaacatgccgaaaaactttgggtggtgtgctgcagtttcttgccaattccaaggacttgggctgattggcagagtggtgtcagctgagacagacacatgtgctgaggcgagacctgtggaggacacatatttgcagggagtataaaaaggactcaatggacagtgatggaggctgagctaggcttgcttatagagctagctgtgcaatgcttgttggtcttgtgtctccactgtcttcactgatcttcactttgctgagagaggcacagccaagaacttctgccatccctcctactgacttgtgccaaggctgaggcctggctgtctctgctaggtcatgccaccgctgctgattcctgtttgctaactctaactttactgaactggtctgctggtgtctcagttaaagtgcctgtgagtggatcaggctgctgtagctaacctgtgaacagaactgtcaatttccagacgacacagatgggagttgctccaaagaacccctctaaacaggtccactgcctttgtatcctttcttttccactgcctatggtgggttggtgggttgaaagggaggttaaagcatttaataaccatcattaaaaatagactttgaaaaaattagagttatacggtaaccataggcaggttcccaggtaacaggaactcagcactctaaattcactagtctgcccccacccaatccgaagcttactggtgttgaactcaattggaaaccgaggggtttgtgggcatgttgaaagctcgtgtgtgtcccacacagggaggatgagagtggcaggactgagaggagatgtctccagacaaaagccagaaaccagctttggtgtggtggcagcgagccttctgcctaggtttgccagaagcaacaatcctaaaagaaaatagcaagtcagcaaaccaacgagcagtttccttccaaggatctgctgcttcagggccgaagcgcgtctgtcagccatggttacactgagccctctgcatctcttagcctcaaactcccccaagtggcagcttcatcctccagctagtccacctgatcccttctgagtgctgtactcggcgtagtcagagacaggacagccatctgtcctgtcaggcttcacgcaggagggagaaaacctctccagaacatctcggaagattcttattaacagccatggttgtgagaagagaatgctgaacaagccctgggttctgctggaaagggaggagcctgctacacattcccccctttctttcttggcggaatctttttatgaagtccaggctggctctgagtgtaccctgccttctctgtgctggtttagaggcatatgcaccctaccccacccacttcatttaacttcaaactacaaactgagttagctccctgatgcatacgtcggattactacatcattcttctcttcgtagaaccctgccaccctggcatacagtcagtaccattgttctggaaccccagtgagacaccccagtctccctcctctgccgactccctatctgtctttataatacacagtcacgcccttcccacggccgttcactttgtgggttctttcatgaccttggtatggagagccctgcatcattggccttcctcagcttgttgtaggaaataccacatgcatgtgacatcccgggagccttcccatggcctgctgtgtgctccatgacagcttgtgtttgtctgtagggcttctgtgaatcccaataacctgtcttctaaatagtctctcctggtttctaggatggaaggaggagcctgtacttattgaaggcatggctggaagcctgggtcagcactcagcttctagcaatcaggcagcctgggatggactcttcttggctttgttgttgttttctagtgaccctaggcaagttatttaactcccctgcgtatctgtgtccccacgcgtcagtaggaacctaatattaacaacctaatgggatttatgatgaacgtcaagcaaggtgacttatgtaaagtacttagcagagcgcctggtacagggtcattgcacagtgagtatttgcagactgaatggtgatgagataaaatatgtttaaacagaactgagtcttttccactattctggagtgccacattatgccctaatatacttgcccggatagaggtctgtcaaggccaatcttttctatgtgactgggaaggggaaaaacgtagctgtctgctgatctcctagcaccgttaccaactgtgatgctgctcagatctgccactacagattgagcctctcaactgtgccagcaattaaccatacttactaagcagaaaggcaggtttgagagcagggactcgcttcctgccacacacacttcagtctcatccattagtcagcatataaacagcaaatacattagccttcaaagaacctcggaggatgggtggcacttactcaagaggaacaggaagaaagaaagattacccagataatgggaagaaaagagaagtgggagctcaatcaatagaggagggcagtgtgggcacatcggtgagtggcagcagagtcttgcaagaagaaagtcttggatagcttccttaaaaaaaaaaaaaaaaggtgaactaccttaaattaatgttttgtcacagaagtatagaaccaggaaggaattttaaatcctcttgtttgaagaaactggagctcagaaagggagttttgaccaaagtcacctcattggtcgacacccccagatttctcttgccttaggctgtacatttcctttactaaagcggctcttgaagagtttagactattcggcttcttaaagcgacactgaggtagcttattaggaaagtttcgtcatgggtggggaggagagagaataatgggtgtggagaacagggactgagaagggaggaggtcgctgggaggaaagtcgtcagcctcttctaatgctcccttccttctgtagagagcctaagccatatattcatactgaagggtgaatgacgccaagccattctcaaatggtgtctgctaggaagggtgtgtggtcataaggacaagcttatgaagacctctctctaatcccatctgcctcagtgtcatgccataacttcaggaaaactcccctaccaagggaaccacccagaacattctaaagggacgattcttaagatatttggggacaggtgccacaccatgaccctcgtctcatgcctcagttattcaggctaaacataattcattctttctgctgctcccacccagtttacccttgttgtcctgctccggatgagtggccatctgtccctgtctatttcaaagaaccatgaatggtacatttaagaccagttgtgcaggaagcttgggacagtcccctcccactcacccacccccatggttcacgggtaagtttctattaacagagtctgagtaacagggcctcttccgaagctcataggcaagcagctaccaatggacactgagctgcacagaagtttgcgctgaagagggcttcgcccagtcatcaacccacacatccagttacactggagaagaacagacaaatatgggagaaagcatagcagttgctgtcacattccaagccagctccccacgcatgctcataaggatacttcccttctcccagatctgaaaccacagagtcctgtctgaatatcctttctttcatacttataccattgtgttgcttttattctttctatcaaatccatcccttcccatttcctcctgtttccacactcactaccatctgaagagttgctcacattgatgtcttccttcggctgctttacagggtggatccagaactctgcattggccttaaacatacctttctgtcgcccattggggttgggctagggatgtaatccgtgttctgactgtgttgctcctcaggagaaagaaggaacttccaattctaccttcgtgaccttttatttccactggcttcagctcggtcctgctgtctgtcacttctccactgtttgcatcgcatcctgtatctataagactatatttttgacatttaagaaaaatgtaagcatctttttttcccctgatattttttttggttttgttggctgctgctgctgcttcttcttcttcttcttcttctgtttcttcttcttcttcctcctcctcttcctcctcctcctcctcctcctcctcctcctcttcttcttcttcttcttcttcttcttcttcttcttcttcttcttcttcttcttcttcttcctcttcctcttcttcttcctnnnnnnnnnnnnnnnnnnnnataacattcattcttcatctacttcatattacatctacctctccatcctcttaaacaaattcttcctcctcctcttctgtcctcctcttcttcctcctcttcttcctcctcttcttcctcctcttcttcctcctcttcttcctcctcttcttcctcctcttcttcctcctcttcttcctcctcctcctcctcctcctcctcctcctcctcctcctcctccttcttcttcttcttcttcttcttcttcttcttcataaggtctcctgttgtccaggctgccttaaaacttaggcttattctcctgcctctacttacctaatactgtaaacaggtctgcaccaccatcatgcccagtttagagaatctgggaagcaaacccagggggtctgaacacgtaggcaggtctactctgccaatcgagctatatccacagccccctataaaagactttcacttatttctttgaaacatcacgtctgcctctaatccattccacacagagcctaactggtccctttaaaaataataatttcattttcagagactctctttcctaaaaatctctagatatcaaagcattcatttcatcagggacgatgaagtcatcttaacttactcaaagctgatcttcctaattgatcaagacattcttttcttctctacttactagaagagtcattagaatccttctcctgcccttaccaccaacttcccgagactggcttgggaaggtcttcttcagcctgcaaaaattacttgtaagggttgggctttgatggtcctctctctctgtgttcttgtgtagtgtaccatatcttgtcggtccatacatgcaggccctgtttcccgaaatggactgtgagttctgtttatgctttgattttcttgtttgtgtgtgtgtgtgtgtatgtgtgtgtgtgtgtgtgtgtgtgtgttttcttaaatgactggactctgctcccagagtggaggcagacatggtttgcaggtgtcctcaggtcagagaggagatgctataggctggggttgtgctggaaggagagcgaggcacggaggtgaagcaaggtccagggagcaaggcaaggtcatgagtacacaagcagagcccaggatggagaagtgtgggaaggcattgggatacaggctgcaagttggaacagggcagactgttcagagccgtcgtggttgaggaaatgctcctgggaactgtcaggcttgcttctgtgcaggatcagccattaaaacagaactatgtgtgtaatcggcattaatgcatagagaggcaaaagcataaatcaaagaaaggctgcctaatcccgtgttgaaatatcacattaacaagaaatttctatggcttcctcagtctcctacaaccagttttatattaaaaataccagcttggcaactttcccttaaactatggggtctcttgaggcatctttaatgtcgtacttaagccagtgtggaaaggaccgcctttgctacacatactggtaagacagcctggcttacaaatgtagcacatggaaacacacagataccacttggggacttgtgcagattagatccacaggaaaccttgcttttttccccctccgcccccaccgagtctgagggacaagccttcttgccacagctgcacaaaattaacatccggctcctgccaagaaagcaggtgacaagctcaatgggtctccttgggttcgatttttgccatggcaggaacgtggacattctgactaggcatttgtctgtggagctagaaggatggtaaatgggcaaggaggggaggggagtcgggaagcagaaagcagcacgtgggagcaaaaaaaagaaaaagaaaaaaaaaaaaacaccaagacaaaaccaaaacaaaatccaggtgataggagcaagggcagcttgcattcgcccaagcgcatggaaacaagctgactcacgaaaaccagggaaagagcggagaatttgtgcatgcatggtgtgaatcctctaaggaagaaggcaaaccaccaattccaattaaccttgtgcgttataagcaaatctgagtattttgatcaggagcttctgaaattgatctgtattgccccatgccctgataactggtaaactgcatcagaagtgagacacctgggggttaggggcagaaagccccttcctttatggggtacaactgcactcatgtggtttccctgttgggagctgtgggtattctagactgggccgaagggatctttaccacccacgctgccacccagcgtgcctgttttcagggctttacacgaagagggatattcatagttctttgtattcgagaatagacaatcttactggcttgcagaatttcaagtgctagggtggccaactgctgcttgttaattgttcaggctgggagtgggcatctgttgggttttagaaattcaggctgggtgccacattccattactaatagtgcccagtttctggttctgtgaggcatgagactcatccctctccttgaagacaatctaatattaacctcaccaggtcccctccttttcctcagacaaagagtaggtctgagaatcacagcacccatgagttcctcccctgtgtttcgggtcctgcttatttgcattctgattttgatttttggttttctgagacagggactctatgcacccaaggttggcctagaactcagtatgtatccaggctggcctccaactcagattttttcctgcctcagcctccgaacgccaggatgacagaagtacacggtcacaccgggtgcatgtttagtactgaccaaaagggcaaagatactgaacaccaggaaatgcatctcacccaccatggtgtcccagcaaataaagttgggtgtttttacaataccgagatccttaaggtcgcttggggtcaggctgggttttccagtcatctgcgtgtttgacctcttgagtttattttcttagctttcctacgtactttcaaatggtctttcaaaaacagctgacgttgccaggagtgtgcttgctacccgtgaccaaagcactttatttcatgcagattcatatctgttaaagtctctttgatagatattcaaaataaacggtgactattgtgagcccagtaggttgggttcacaatacatgaatgttggtttataaaactctcatgtcttttccaaggctcattacttaacaccatatcttgtcgtcctcatcttctcctgccttgaagtccatcttatgattaatttgttgttcattttaactctgttctcaaatagcccctatgtataataaatgggtgatgcattatctacagccctgattaccccaaatataattcactctgtcaagtctaaaaacgggatgccaagtttttagttgtgttgtttttggttatacaagatatatgtgtatttgtctaacagtattaaagaacaaaggtaataatgtgagaagaacaaaaatacagtaaaatatcaaaagtaatggggtaggggattaggtcacgtgcagagcctttaggcaaatggagctcccttacagaacagatcgtatgtgatacttctgctctgtcgacacagaagattacagaaaaaagggaggcgtgtcctcacattcaatctgctgaggcctttagctaccttgacctcgggcttccccacctccagaactctgagacgtaacactctgatgcctagcattcacctagcctctagggtattttattttttttaatttattttaatttatgtctatgtgtgtgcctgcttgtctgtatgtgtaccacatgtgttctggtacctgtgtaagccagaagagggtgttagaactctctggaactggagttacaaatggttatgagccacctagaaggggtcctgggaactgagcccaggtcctctgcaagggcagcaggcactcacactcttaactgctgggccatctcagcagcctccaacaggtggactaaaaaccagagatgcagggaaaggcatgtggactcaggaaggaacaaaggtaactgaacctatggggctttagctaagtaataggccatgttctgtttcctacaatttaattaattcagtcttaacagtttgactaggtatatgtcattaacacaagtaacacccataattaatgaaacagatggcttacacttagtcaactcaaagcggggttattaaagttttatttgaactgacacatccatgccatcaaagcaacaattaaaagcacgtgtgagcaaagactgctctgatggtttccctttgatgaaataaatatctaaaatgaagccttgtcttgtacccagaaattcatctgaaattttgtgtcaactcctaaaacttgaaaaatgctgctgcctttgtgctttgcctcataattaaaaaaaaaaaaaacccaaaactataagatagaagcaaaaagaaaattgtctacttccttatttttattcctagttgtgtaagctgaaaacatagtgcgattctctgaatatattatatggaatgttggagtgatgttttatagcttgaaaaagggtcagtgagcacattcacaaaggcatccagtagccatggttggtcacaaccttcactttgttttaattttgcaaagaaatgtgaagatttaaaaaaattgtttatgtggtgtgtgtgtatgtataagtgcgtgtacctgcagagaccaaaagagggtggtggccatcccaagactggagttagaggtggttatgtgcttggaacagaacttcggtcctttgcaagaacagtgcctgctcttaaccactgagatatctcaccagttctcagacagagcatttttaaaaagcacatttaaaaaaaatattttaaaaacgtacagactgttctcagactcatgaaccttctgcctctatctcttccacaaaccctactggcatactggcatatttcatcacagtcagaaaaaaaaaaaaaaaaacccttaaaggagatcccgctgataacctagaggattatttcttgaattatttcctcattcttctccctccatcatatctcaaagccgacacccctccaagaccgtttttcctctatggactgtgctcagctacccgccaaattcttggatgcccacaaacccttttaaatcttcttcatattcccccaccccattttttcatcattttaagtttctttcaagaaatctctggcacatttctcattctagacagctagctgtagtcagtgggaccatgacatgactatcaaattaagtagagataatgtcgataaactttgaagttttcatggcggttacgtgttggaaaaagaggcaaattagttattgatatacaaattctacttggaatctttatttgaaaaagatgtatgaaggccatttttattgataaaaacaggctgcttttgaagattcaccatcacattagcataagaaaagctctgagaagtgattgagaaacaaagaattttatttctttcattccatctaatatttttcccaaatggatctcagaatgaattcttttgatcatctcctatcctctcacatacaaaagcacccacgaaacacaatttgagcaataaaatggctttaaatagtaaaagacataacaaaagtaattagaggctatcatatacacaagtgtggatggatggtttcctggggacagtagtcgtctgaatgaggtctgcattttccatatgtcatgtagagtattatcatttcctaccttgccttatgggccactgtcaacatgtatggttcacatttaaagaggctacatccaactgctttggatagcacttctccttggatgggttttcctaaggtgttttgtgttgctatctcccaggtgtcttgacttgctttaaacattagccagtgccctgaactaatacggccattaacttattcactgttctgtaagaacatggcccatgatgaaaagggtgtgactggcgtaaatggacttgtccttagctattgtatgtgagcaagcactcaggtgatgtggtggtttgaatatgcttggtccaaggagtggcactattaggaggtgtggccttgttagagtaggtgtggccttgttgaaggaagtgtgccactgttggggttggttttgagaccttcctcctagcttcctggaagtcagtcttctcctgtttgcctttggaacaagatgtagaactctcagctcctcccacaacatgcctacctggacactgccatgttttctgccatgatgataatggactgaacctctgaaaatataaaccagctccaatgaaattaattgatgcttgatcatggtgtctcctcacagcaatggaaaccctaactaagacatgtggtaattctggggaagactctgaaaacagtgattggagctatatatgctcatgtaacatccaaaatctcacagggattcatggttaggaggcaacaaagaatgaatagtttacacagttcaaggtgtcagccagacctgataatatttgggaattttccagaaggttcctcaccaacagaaagatagcataaaaaaagattttaggcaaaaaacgaaacagattattggcatctaatttactttgaactattggtatttggatcgatactggatgtgaagattcaagtctattctttgagtttggaattttatcacctcttggccttttggctaagatcaagtgcaaagtttgaaaattatggtttgtccaaaatttatctcaacataaactagcatttctacctaaagacattcaacttatagggaaaaaaaaagtatgtacctaaaaaataaatttcaggtttctatgttatatccaaaggtggtaaccattatccattaaacatttccaattctctatctgaatgaagctaggattgcgtgctcctcccactttatggtaactgaagacatgtgaccagctttggctacggaagtatgaaaggaaaaaccacatggcttccaggcaaaaatcctaaggacagatacataattatccatagagtgagcaaaaaattaaaaattactctttcatatcatctagggttgggagtgcttgttactacagttttcgctaacttattctgattggtttaccacaacagaacattaatagtccatgaacagcatacggtagaaagtttagacaaaaagaaaagatacaaatggcatattaaacgtgcatttcaaaatattgttcagtcattggcaaatatatgtgaaattatgttattgggggtatactgagccttaagaaccttaaaactggaggaaaatactttaaaaaagaatatttagtatgggtattgtgatagtttgtatatgcttggcccagggagtggcactattagtaagtgtggccttgttggagtaggtgtgtcactctgggcgtgaactttgagaaccttgtcctagctgcctggaagccaatattctgctagcagccttcagatgaagatgtagaactcttagcttctcccacaccatgtctgcctggatgctgccatgttcctgccttgatgatactggactgaacctctgaacctataagccagccccaattaaatgatgtccactataagagttgccttggtcatggtgtctgttcatagcagtaatgccctaactaagacaagtatattgatagatggatggctatgtgaaatgtgacatatttattccacagaatattgctcagtcttaagaataagggacacattgacatatgttgcagcatatgaagatattttgctatgtgaaataagtcagtcgcaaaaatgtaaataccatgtagtggagttaacttagaatagtcaaaattgtagagacagaagacagacctgtggatgtcagaacctgggagagagggaacgtggagtgtttactgggtataaaactccagcttcacaagatcatagggtattatggagacatcctgcacatgtgctcagagctgaccactcagcagactgtatgtgtgtctgagaccataaaaagtatagaataagaggtgatgagtttgagagggatggggatatgggaggaactgagggggcaaatgaggcagataccatgatcatatatggagtatatgattgtgaaggcgtggagatgaacactggccacagctgctcagtatatgatactgtataccatacaggaactaccactgttccattcaaataggtaagatggtaaactttatgttatgtgcgttttgctgagatttaaaaaaataggggaatgtttttgtgggaagagaccaaatactctatttttccctttttggggtaatcatgccctttctgggcttgaagagtacctcaaatctctcctttgagaaatgaagaaagcaagtgattcctggtgtctagatgatattctccttgtccccaagaggtcacctgatggccagacaggagccgtcatcgtgcaacctctgcccctaagtagagctgtgctctagaagttgcagggcttatgttgcagtttggcgagataccacatccgttctcctcctcctcgtggaaacaaaagctctgctcagagcaaagataaaccttcactaaagcatagagagatggtaaacagcctgatgaaaccctgcagccaccttgcaaaaaatcatggtgtcttctttcaaaacatgagcacccagaatttggccagtgaggtgtggctcactggtaggtgcttgccttgcatgcaggagaccctggatgtgatccacggcgcaagtcagtaaagaagtacatgaacaaatcccatattccccgaggaaatgccacattcaacatccagcttcctgtgtgtgtgtcctcatctctcatgacaagatggcacctgtgatctctctcctgctgtccttgaagataaagaaggtgacagggaaggaaagcttcaccacagggagctcctctctgagactacaatcttcccaacagggtaggagggagcacaattatctgcaaaggctgcaattagtagtgtcagatgtaacctttgttccgccgtgagagtccaaggcacctgcgtcatcccctaagatctactgctctgtctatgcatgacgaaggttttgtccctctgtgtgggagcctgtgcttactacatcacatgcctgtgttcccaaaggacccatctcattccaagacagtgatgccttgacacagaaggagacaaaggtgtgtgacttcccttttgagctgcctctcaaatttcctgccagattccaatgagaccaccacgtctggagtacatgagacaaatgtggcgggggggggggaatccacttttaacttttttactgtggagtaaaaccttcaaaatagttcaaaatagtggaaaaccttcacctgcataccatgctgtgacaggagtacagtgagacattcatgtacacacagtcaggtgcatgtaagtgtgccagtttgactgggaaatcttcatacaagacagcatccatctctgcaggatagagcatttgtgtgtcggccggggtgggtatgcagaagtggaatccacattttagcaatgcttttttcttttttcctcctgcttcacagtcaactgccatttttaaaagcatctgttctgcaagccaaagagggggaaggggacatataccactcacttgtaagtgctcagagaaggagctctggagaaacgctgcccacttaactcctcttagctctgtgaatgattacagggtttgggctatttctggccacatctccttgtctttgaaaaaagggaagtcgttaagcagagtgggcaattgtacatttgtacatttagtaattcgccttgagtcagaaagtctagacactcccctggggatatgaaacagcatggtgtgtgtttctatgaccttcaagactcttttgtaacccaaaaggcattgagcaaccagatctcaaagtaagtgggctccagagctcctggttaggacatgggaggcatagagaaagtgcactgagccagtagctggacacagccagtcctgccctgagcaggggaagccaccagagctatggatcaggcagggctcagtcccattcaaatgccattgatttcctatcacaacaacctgagaatttgacctgggcctctgtcctttctgctgagcagcacaattcaaagagcacgtatttattgggtgctgccaggtgcgggggacagtaacacctgattctcttgcgcttcatggtagcactgtgagcagaatggagagcactggtaggttttagggatcctgtgcctccgttgctttttgttttgttttgtttttattttgctgtcttttaccatttgccgtttcaaggtgcatcacagaattaacaaggacgtgtatgcatcacgtcagagtatacactttcacttctttcgcaatggcacataaattagtggtactagattcagtgaggaaactgaggcagagatgtggaaactgaggtttggggggatgaaatgattcactcaaccaggatgtgttggagctagaactggaattgatgcaatttctggaatggagtgtcttgaaaggatttggactgcctgggtttgatagtgaaacttactgttttgcataattactagatggcagctgaaaaggaaggggaggggggacttactgggtttgcagtccagtttgttcaagtgctagctagtcttgtgacttcaggcaagccttaaccttcccttgtgtctttattaatggtgacaacaataacagtaactaatccacgggattataatgggagctaaataaggtagcacacgaccttgggctcatgtctgacatgtctggaaattctccactaaaatttagctgtgattagctttcacgtgttttgaagaaaggcaactagaaaaaagtgcaactaaagagtgtgttcaacaacaacatctccttggccctaaaattatcttcattccaggagaggtaccttaggtggattttggggaaattattttttttgtttgtttgtttgttttttgtttttggtctgtttcttcaaaaccaagatatcaaataagatgaaatgggagaaaattctgagaggaagtagctatccaaggtaaggaagggaccaggacaagagaaaggatgcccaggagcagtgaaatctgggccagccttgggcaacagggtttatttggaggaggtgggaatagcaagggggttgtgctaaggctggccagagatgacaattgtgaccccagaaaacagtggcagaactggggactggaaccatgacatagttttcagtctctagtccctgattccttcagaaaccatgggatgaatcgggtatgtcacaactggcatttgtgagatgcaaagagagagacaagcaggtgagcacaggagaaggggtacgagggtccccagagcctgtgtctaggagagacaagatgctcatgaacaggaggggtatgtaaggcagtgcccagagccgatgtaataagtacaaacatcatttcatggattttgtcttctggttggggcgtagcaacaggggtcatggatcatgaagcaaggtgaccttctttctatggcttttgcagtggaagtttgaaaacaaatgcattgaggtgaggatgagagtcagtaggtcctggctgaaaatgacgcagaggatacatttaaagtgacacgtttcatattaacaagtgtgttcattggctcactgctctgacagagtgcacaagcaagcttgggaaggaagggtatcctttgcttctggtttgagggcacccagtctgctagtgtggcaggagtgtgaggcagttaatctgtggtatctacattcagacagtaaagagagatgcaggctgcagcctcatttgctttctcccctttctctattgtgttccatctaggactcaggttcattgcttcaccacatctgccaggcctcacaggaaacaccctcacagacaggtgcagaggtgtgtctcctgagccattctaaatctagccaaactgaccatgaagattcactgccataacaaagcgaagacccccatgtctacttactgtaggctctcagacatacctttatgcagactcaagacgtgtttctgctgctctgtgtcttctggccttccctaaacatgtaccctcaacctcaccctaagacagaaccctttcctttgttcagccactttgccccacaatgcctgtcccttcttcccacatcccctccttatgccaggccttaggcctgaccttccccaggataagagcaagctggcagctccacccaggaggacaggctgtgtcattgaaatacaaatgacaaagagtaagtcaggcaagtcacactctgggatgctcatatccacacaatgcaacctgggacctgaccaagcagtttgatttcacacttagaccaagagtcaggtggaggagaggatccagcctagcaagccccatgtttgcttctgcataaagaaccagggctacaaagcagtgcctgtgttttgagggtattgaccacttgagggtgaaccctagagctcggcaaagaatggatagaaacccttagccacagaggtaatggtctagagaggaacatggcacactgcagcacagaccctggttttctgttccaacttctccagacacagggaagcaggaagtccagggctctgccatcaccaccagagaatgttacagtccccacaggctttcaactcaacctgtctgcacaaccactctgctccatggaaagagcacacggcaagtctctaacctgcagagcccaatttgctagctagcacagtgccattttaatggaatggaactagatttcatcttgccctgggatcagtagacagccctgtcatcagggcagctgctaccagaatcccagagttatccacacactctctgtgcagcctaaagacacatccctttctaaagcacaggcccaggttcatggcttccactgtgtctctcaggcctgaggacaggtgcttctactgtaagtgcctccagaatttataaagccaaggcattgccggatggtactggtataaatctggatagatgaatggaacagcatggaatacccagcaatcaatccatatatagccaagtgattttcaacggaggtaccaagaagacacatggaagaaagggtgatctgttggataagtaatgattggggtaattatatacacacaaaagaatgaaattaggatattacccctctcaagactatgaagcaatcagaagaaaacacagaggggatgttataagtcattagtatgggaaaaagaacttcaaagcacaggcaattgcagtgagaatatacaaatggattgactccagcgaagtttctgcccaatgaacagaagcataaagcagaatgaagagataacaagtggaacaggagaaaatatcagcaaaccatcacccaacaaaggaccaatattcagtgttgccgtctgagagtcactccgcaaaccacaggaacaccaatctcagaaagggatggtttattgaatgcacatcctaatgctgatcagggacatagctcggattattggagctatggctaccaataattttctaagggaagaacttattggaggaaaaccaccattaacttcatttgcaggggtggttggggggtcagcttctaattcaaagatattttagacatagcacttcatactgacctttaacgtaaagggtcctatgtaaagctttgtcgaattcctcaagattagcaaacctgagaacatacagaacataacagaggatgtggtcagcatgaccctgctccgagtcaggttactcttctgtgtcagtgactaggaggcactgtacagcaacaatatgaaattgccggcaggcatgggacaaagcggctacaactatgctggtaggggtttggggggcagacctcaacattcagaatatataatcatatgatttaaacactgggcaagtgatatcaatatcatttgcatttaaaaatgagacctaaaatgcgcaagaagaatatgaaagagaaaaaatactcatcactagacaacagggaattgcaaatcaaggccactgtgatgtactaatttcaccctaattagaacttctattctcgaaaagtcaagaacagaaaataacaaatactggtagaggtatcgagaatgggcaggtggtatgtgctgtttgtgggaacatcaattagtacactcactatggcaaaccgtgtggagggtctccctaaaactaaaaagagcctactgtgtgacccagcagtcccattatttgtcatgtatccaaaggaaatgaagtaagtatatctaagaaatcctggggctcccaagtcaactgtaacactatccataccagccaagacatggaagtttccaaggcatatctatccgcatatgagaaaatagggaaaatgtgctaaatgttttagttagggttttactgctgtgtacagataccatgaccaaggcaactctcttaaggacagcatttaattggggctggcttacaggttcagaggttcagtccattatcaaggcaggggcatagcagaatctaggcaggtatacggtatgggagccgagagttgtacatctttatatgaaggcctctagaagactggctttcaggcagctaggacaatggtcttaaagcctacccccacagtggcacacttcctcccacagggccacacctccaaatactgccactcctgagccaagcatattcaaaccaccacagcaagtatacactatatgttcatgcactattaaaactgaatatttctgcttgcggtaatgtggataaaatcagaggacatcatggtaggtgtaagacgacaacactgagtgttctacatcactggcagtagttgagaaaaaaatggctacatgtaaaatgagagggaaatacttgctattagagacaaagaagacagaggggagatgggaggagttaggttggatgtaccagcacagagctagaggggaagtgtccaatctgacgcacagcaggataatgataacctagacagtatgtttcaaagtaactagaagtgtttgaagaggtaaatatgataaatatcctgatttggttattataaactgcacaatgcaacacattttacactctacaaatatgtattataaaatagcatgcatccacctaaatatgcttcaataaaagagtctggctagcgtggattccaaatgaagatctagctttcagattgagagggggtaaaggagccaagaaggggagatctgaccccctttctatttgaagtgaccagtgagaagtgttacgtctggatcaaattagcactgtttcgacaagtttacatgcacgcggtttacagcaggacatgggatcaagtacctgcattaatctgagatgcctcttctctggaaacatcaaatagggccaagactatttggaccaagtgactctgagaaagatactcggcatggtaccagccatcagctgttggctgcacttgtcaagatacatgagcctatgtgtgttctaaatcactttcagtgtcgatgtaaaaagcaaaaaaccaaccaaccaaccaaacatgcaaacaaaccaaaaagcacctggaactcactgataaatagtatgtggatgctcccagaagaaagagaaatcaaagctcaccaccatggtaaagtggaagtcagcttgctttacaaatgtcgaatgatgggctgggatcaagactggatgtgataaggcaagtctataagccccaaccttgaggctcaaacgggataaagagtttgatgctagcctgagctgcactgtgagacttgtctccaaaagtcaaaaacaccaaaccaagccatcagcagatttgaaataattcattaaaattctctcaagattaaagaaagtgctaaaactgggcactgccgattgtgacgaagacttcacccacagaattctctagagtctgggattttaactctatgattaagtatttggccagtgtgaggttgtgacttgatgggttcaatccgaagccctgtaaaagaagtgcacacataccaaagggaagggggagaaaagaaaggaagaaaacatgagcatggggtatgggtctaagaggctaagaaaagaggatattaggggctggagagatggctcattggttatggacactgactgctcttccagaggtcctgagttcaattcccagcaaccacatggtggctcacaaccatctgtaatggggtccgatgccctcttctggtgtgtctgaagacagcgacagtgtactcatacataaaataaatacatttttaaaaaagaaaaagaggttatcagatttgaagttaccctgggctgcatatgcaaccaaaccatgtccttgaaaaataaaataaaataaagttaagcaggcctggcatgggggttcatgcctagcaatagagaggtcgaggcaggaaaatcaaaagttccaggttaccctcagctctctagtaagtatgaagccagtctaagctacatgagactccagctaataaaacgctgttaagaacataaccttgttctttaaggaaaatgggttttgacatgaacattaaattttttctgcacttatatgaacctaactaccaagtgaatttagacataaaagttgtacttcttaaatattactaggaaaccaggaagagctcagcaggaggtagaaagaaaaatcagcctggggtctagccagcctcagcctaaggctctgtcccctagagaggagccgggaggaggcttggttcctatgcagccatttctcaaaagcatctagaaatcctcctttgtgagccccttcagggcttataacactggggggagcctgtgtggagggtgggcagcttccctgctttatgaagaggccgctgtggtcagatgagacttttggaaagcacacttgagggtttgaaggcagcagctggtctttctcctctcgtgcgtaagcaagtccctacaggagtgattctatcagttcattaaggctcagaggaaacggtgatggggaacaagcatggaatcttaatggcgtgcagctatggttggagctaataaagatgacgctgccttttccaagtttggcttttacgttgagcacgataaaaaggagacgaggggatcaactcggtgtcctctaatggagctcaattctggggcagtccaggatttctggggagaagaatcaggagtttgaagggtctcccaatagttgttctcttttgtgactgattcctctccaccctcaggattgaagaatggccagctaacagtagggaagggtcatgggaaagaaaagaaaagcccagaccttcctttattcacataagtcacaggtacaagacgggggggggggcagaaatagagacaagaaaataaaaccacctgtaaatttgctaccaaaacctatcccagccagtgtagtggtatatctctttaatcctctcatcatggaagcaggtggatcatgatgagttagaagccaggcctggtcttcataggtagttccaagacagccaagactacatagtgagaccctgtttcaaagaaaaaagaatagaaaaagaaacatctctaatatattaatatatgctggtatatcgttttcaaaatgcttataaattaattgcataaatataattttcatatgcacatataagtagtcatgcagtcataaaatatattttccttccaaatagtatattatagattctttagttttgtttcctcttaataatgcatgaatgtcacacatccataagcgtactctatcattgtaaatagctacttgctggtattttcgtggtgggttataatatattagccaaagtctaattttagacctttacatttcaacaggttcttgtgatcttttgagcaaagctgagatatccctgcttaggcttgaggttttaatcttctctcccaatgtctccttcccgacagtgaagagcgctctgttgcttgtttcttgctgtgatctgagctttattttttctagaggcgaagcctttagtcaggaaggtagagcttcctaattgggattagaagctttataaaacagatctcaaaacttttactctccctctacaccctgagaaaacacagataaaagcagacaggagaggcagaaaagatagttgcctgcccacaaacaagtgtatagatccttatctaagtagtctctatgtaaccttaaccttggacttcctggtcttcagaatcgtaagaaataaacgtcttttgtttataagttagtcagtgtgtgctgttctgttatggtatctaagatgctcctgataccaactgagcgtgttcattgcagaaagctgatatattaagtggggaggggaagttagtcccgtgaaaaagtaagtgagcatcctttcatgtatgtaactatggattgtatatagataagcatgataacatatgtgtattctatatatgtgcatgcacacatgtgatgtacaaggacatactcattttgttttaagcagagtagatgtaacttaatgaaggaaaataaagaagaaactcatgagaatgggagggtttctgaagggaaaatatccccgaaggacatgtttttaaagatgccggtgatatataattctcggtgttttcacaatatatggcagacacccctccaggtcaactagtataggttattaatttttaactcctatgtggtgttccatcctaaggattgtcatacttcatccaggtattcttttattaatggatttggtttcccatcaactttcagttattaatactgaaatactaaggttgcagtgatcatccttgtacatagatacttgcacactaggggttgttaatttctatagtttatggtccctggagtggaactctgcatagaattgcatgtgcgtgtaaatttttaacagaggccataaatcccttttacatgtgtctgccggtgatagatgagagcgcccttgccccgaatcccatccctgatagcattaggtgctattacatttttatgcttgcccctgagatggggatcgtcatagtcattttaatttccatctctctgcccattaggggaacctgaacattttatcttacttgcttttctggcaattgccttttcctatctccaacccattttgctatcagttttgactattcttatctttttaaattgtaaaagagctgttcttaaattatagatatgaacttgaatccatcatttgaatttaaaggattttctccaacttgtttgccttgggactttatatttggtatctcttgagctctctataatgcctaagaattttatgtatatagatgtgtaatatacatggtacatatattcttctattaattaaaaacatgtcttctgggccaaggagatggctcagtagataaaggcacttgccacaaaacttcaagacctgtgttcagtccccagatcccccaaattatcctctgatttccacatacatgctatagcatatacatgtattgtgcatgttcacactcataccacctcctccatatgtgaataaatgaatataaataaataacaaaaacatgaacccaacagcaccagaaaagaacaagtggttagctcttaccatgacctttgctctgcttgggtttttgttttttgttttttttgtttttttttttaggggggggtgtttgtttttgtttttggctccagctgaatccaaaatggctggttctggagctaagaaggactttaggtaggccaagccaagacagttagattctcacatacagagcactggctggtagttgcttgtggaccttattaatgaacacaggcctctagctagggcatttatgcagttgtggagatttgcacaatgctagtgaatataatgtggcccctctatagtatgtctcacgagctccttggcctaatctcaagggcatgcagttctttattctctcagggctcagaactccacagctgcccaagcatttggtgatgccagtagaccgtacttctgtgaaaaatcatcactttgccttttctcaactctacttgagcatgttgggggcttgattaagctgacaaccagccagacttctgagtttcaaggataaaacatatttaggtacaactgtgacttcaaggtcaccacagcttctcatgcaatggggttacgattgatgcggttattctgaaaactccttggatcttaactgtggacgagaaggtatcgtcgtaacaaacgtctagatttctagacacatgtctagtctgtgcacaagctcagtagagggcatgactcaccacctcaaccttcctctacaaataccgtttcctcaacacctagctataaatacaatgctccattttttccctaaaataattaattttactttcaagtttcaatccaccaggaatttatttttgaagctaacactaactttatatcctatcttcaggagaccaattttattcttctccataggggacgaaaggatgcatctgacttgcactcttagtcaatagtccatcataggaggaagtcagagtatgaattcaaacagcacactggaggctgaatccacagagaaatgttgcttttcggctcattcaccggcttgtgctcagctagctttcttatgctacccaagactatctgcctagggaatggcgtcacccatagtggaaaggaccctcccatatcaattgaggcagtcaaaacagccttccacagtactagaacatctatcaactgaaacttctcagaccagtccaggctatgtcaagttgacaaagctaacagggacaaagggttttaaagctttttttttttttttaacacaaaatgcaacctttgtaaatgatttcttggtggttcatactatgtaatgtttttatcactctcctttgagactagataacactttgaatatttagcactattaaatgttttggggatgatgctatgcttgtgtgtttttgagtctgtctcagtgtatacatgatttaagaaattgcagtagagattacaagataaatgattaaccattttcacaagttttcattttgcataatatgtaaagattatcacttaattacatgtttcatctggttattagaaatgtagatgaataaatgtagatgattaataaaaaagaaatcaaaacttatgcaataatggatattactttttaagaacttaatgtaggtttgtccagctcataattttgccccacaggtctcattttcatatatttctgatttttatcaatactgtattttagatgttttctttatttccatgtatagtaaattttgttcatgtagaaaaagctaatgaatttatctctttactacccagctttatcaaattctctttttaaacttttttgttttctgctagagtttatttttgatgtcaagcataaaattatattaccaacaaaacatatttcacctctttctcccacattcgtactgtccatattatacaacatatgcactgtgaatgcaatcatttcctagcatatacaaacaacattaaatgataatgccaatactataggttcctatcttattctttattttagcatgaactgttatgtttagagacagggtctcatgtaactcaggctgacctctaacatactagttagccaaagatgatcttgaattttttgatccttctgcctccacttcctgagtgctgggacttcaggcatgagtctacacctgctctgtgtggtactgagtattgaacccagggcctcatgaatgctaagcaggtactttaccaaccaagctacattccagttccaaaatttcatttttaatagaatagctcatgttgattcttagctgtaggttacctgtgcctctcattttgttttctcattctaggatccaggccaagttcagatttctgggggcggttgccatttttataatagagaaagttgccacagccatttcatttagctctaaagaagtccatagctattcctcttgtgtttattggccaaacccaataaaatggccagatgaaggcctcatggtggtatgatgtcaaggctgtggagaattataatctacccacagacatgacaataagtaacaaactacacaacagactctaccacagctcaccatttatggttctatttgctgctttctcatacatgaccttcatggatggccttcactgtgagctgtgtacattctttctatgcctacggcacttggtgtgtgttttaagtaggtgttggactaatccagacgcggtgccatccacggacaaggtgcagttgtttttgtttgtttgtttgtttttttggtttttttgcttttagtttgttgatgcaatacaaataatttccccataatcaactcttcttgagttcccagaataactgtactgagagctgtgaactaatcccccaataatccagtgaattctacttcataaatcatagaattatagtcctttccctcatcggcgtaattagctgataatcatctctaatgtgaattttggtttttttttaaattttttaatttcacaaattaaaataatttatcggtgttaatttgttgaaatattttccgcacaaacttagctcttctacattgttggattctaatgcttgttttcttctctctctctctctctctctctctctaaaagacagaattttattagcaagcccaggcttgcctcaaacttacgatcttcccagtttttctgtgctaataaaatatacgtcatctaataaagttgtctacatgtgtgtgtatggggggatgatatatgtatgtattcatgcaaatgtgtgcttatgtgcatgtaagtgcatgtgagtgtgcgagtgtgcacacgtgtatttggagggtagaggtcaacattctgcatcttccttgaccacgctaacttatttgttgggacggtctctcattaagcccgaagcccaccaagtcgacgatgtgagctgcctagtgagctccagggatctatctcctctgcttccccagagctgggattacagatgcaaacgtcccatctggcttttcacatgggagctggaatcctaactcaggtcctcatagctacacatctgagccatgtcccctaagccttttgcttccaaaataaaattcatatgagaatcctttgtttagcgttagctttcaaatgcatgcaaagccttcctttatcattatcttttatattttgtgtgtgtgatcatatttcttaattcattccaaccttgtaattttttccataagcatgtgactgatttataaatctgtatcactgatcaagaggtaacttttagcctaaagtcagtctgtgaatgtgaggctctcaatatgagtccctgaactggtgtcaaagcaccagacatgggggctgatccctatagtaccagtgttgacaaaatggagacaggtggattcctggggctcactgaccactcagtgctctataggctagctagataccctgactctaaaaaaagtgaacagtgtctacgacactacaactgaggctgtcctttggcatctacacacacacacacacacacacacacacacacacacacgaacacacacacgtgtacacacacgaacacacacacgtgtacacacacacacagactattctcagatcttcagaggctgaggcaggaggatcacaaacttgaattcgacctgggtcatatcacaatttaatgctttaaaaaaggaaagaaggtagcttttaaataaatattctttttactattttattttctgatacattgtttttagcttatttataaattttacttctaatttatcttcttgtaatttctcaagtaaactactggtcttttgcagtttttaatcataaatagtggagctacctataattaaatttatcttaggcagtcttttatttcttacaatatagactcactctttttctttctagactgtagcataaattttaccatagccccacctgaattatctccacacacactcagatacactcatgtacccttttggtagttcatctcaccccctcccgtgatttaaactaatggtttccagagttcccagaagctgcaagctcaaattcacacattccctcatgcatacaactagttccataggcttagccttgccaacatttctctaaatcaacgataagcatccttttcctggttatttgtagcatggtcacacagtgtaggctgttaggatttatctttcttctctgcctcgcccttcacagccattctgttcaaacaccaaatcttgttttatattaacagtaaaagtttacggtcctcttgtctactctctgccgttgttgccttggctttaacactcagcatctgtagcagattatttcaaagatacaaggctttccttccatttcccttctccctatcctattctgttgcaaacttacccccacccccaaacgtcaatgttctagctaagatgcaaatttcactgtataaaagtattctttttaggattctcaccttttccaaaataaagtccgcatagtctgcacacccttcccctcccctccagaagggaaagcagggatagcaggaacagcatttttgactcacgtaatgaactcgtttatcaatgtgcctttatcctcacaaagttctgagcacagaaaagctttaactaacaattactcttttgtgagctaggacttgtgttagggtttatctttcttttatttttatcattgtaaaagacatggaatgcctttagctgttcatataactatcttactgatggtggttaacattaaaaccacaatgctttgtgttgtaatgagtaataatgggtatattgtaagtatctaggtaatatccatatgtaataacttatgtaataagtcataataagtatgtagtaagttataaacacagtcttacatcataagtgatggtactaggtagtgggtcccaacaaaaacacaccatgcaacaggtctcacgtgggaggtttattgaggcatagaggcagcctctaggggaaagaggaaagaaaagagtggggacagggagaccgtgatttttattggagccatggcacatgcacaaagagacatgcaacaagacgtgtctctgagtccctcaaaagctggctgtaaagatgcctgattgtcgcggggtcgcatttagctgtccatggatgtgcctgattgctaacaataagtttcaaagtggaaaggctcccagtccctgattttccatttcactatacttagcagattggcttttatgtgtatgtttattttatcatgaaagcaaggtgacaaaggaaaaagaaaaggagcccacagcagtgagctctcttctggagcccagtgcctccacaaggatgtgaaagttctctctgaatccccacacccggttttcatttgcatctccttagccagaagcagtcacctgactgttcctattagcaagcccaagaggtttccagcctcagtagtggatggatacaagaagtggatgggggtggggagagaacgaccaagagatgggtccataatagataggcaagacatctttactgtcttcagttcatagatgagaccaaggttaccccaagtcctgctattggttattggtggatcttggattgagcaccaggtcctacttccgaattttacacatctcaacaatatcgcagtttctcatgtactctgacaggatttcagacaggcgtggtcaagggtcattttctaacaccagttgttttccttgaaatcacaccggaaatgttctcaggcattgcgcagagttacttacgacgttctgaacatgacttgtcttgtaaaccagtttcctttttttttttttttttaaatggaaacttagggaccacgctagtctgtctttgaagtacattgcacagaaagcagccacatacagtctctgaccttcccgaatccccagttgggaatccctgccaagtttcatcattgagctttgaaagtgggttttagacacagtcttcttgaccttcggccactccactttgcctaatgaatatcttgtaactggggaaagacagttaaacctcctctaatatatcaaagacaagaaatgaaataactaccccaggagaaggttcatttccacagcgatttctaagggaataaaatatgcatacgagatgctgtgccttatggttctttcatccttcctttaataaatgagagtcagtgggggcaagagtccaattcttcactggtgcaaaaagaatttaaaccttttattagtgactgtgatgtttgggtccgctaaaaaggaaaggcgatttcaaatgatcagtcgggggagtgtctgtaagctgtagacagcgttaatggcgctaattctaccccactggaattcactcttcccctgacaataagtttcacttccacctgctgcagatcattttctatagaaataaagccatgggcaacttaccagtaaagggtataaaacaagatctgaaaaacatgtagatgagagaagaaatatgtatttgaaataatatatatctcaaatatacatttgaaataatacatctcaaatatacatttgaaataattatatctcaaatatatatttgaaataatacattttttttcctttggaagcaacataaccttaactaaattgggtaaaaaaggtgtgcatttgtcctcagaggctggatagccaagaagactcttgtcactctgagaaacactagacaaaaaaaaaagtccatattggtcccagcatcactgatggtttcaatgatgccctcatctttctttccagcccaggcagcgagtgttcctgtgttggaagtatgttaatcttggcgaaataaataacgtaataaaaccttcagcttggaacaggacccaggcatctccttgtacaattatccaagtgcttccgagagacttggctttctacaggggcatgaattcaaaggtgagaaaaagggtaaagcacacaattgtaataagtaaaaagagtatataacataatttagatgtaatagtacatagatgacccctgtcttacagtttttcaacctgagatgtttgactctgtaatggtgcagagtggcacacattcagtaggaaccatattcaaactttgaatcttgatttccctctccctccagggttggtgatatgcatgatagaacactatcttgggatgcttcgtcacagattcatcatctatacaatcggaagaatagacccacattttgccatacactacattgctgggttatgatgggtattttaaatgcatctccaacttcaggtatttccacattgcagtgggtttatcagactatagccccatggtaagtcggagtgtatctgtacataggcttaatcctgagaccctctctattttatgaacctaagatgaaatatgatggacagaagcaaacccagcaatgttcttcatacttagtttctgcaatatctgttgctatggaaacgtgaaagcctcagcagatttcctggaagttaagggtctgcctgcagacttctttccagatgccagcttgcttgcttgttaaataaaacttggcatttatcacacagaagagtttatctcaacccatactaggatacctacccagggtgtcgagcgcagtgctcacatgagcgaggtatttagagagtatgagagagtcgtctattaggtgccttggggcttttagattcaaagaacctgtcaactttgatggtttttctcttccttcatcaacacttcccgtaaagaaagaaatctaaaatgggatcagctgttagtggcccgatgacaggaactcactttgtcaatgaagttgtctgcctgtgttaagcagcttaggtctttctggatacaagtgagaaaaatcacattttgctgtagacatttcgggtcgtctctttaagagtaatttccccctagcaattagacagcagtttgctctcagaaagctgactaattaattaggaagcacttaaatgagttctttcaaaatgtctgaacatgttcttgcttctcctttccgaaccctcctcaacttaactaatagctcttagaaagaatccctccaacaaagatcacatgataattacagtgctgctctcacctctggccttagtttaagaagtgatttaaatgataacaaagtctgcagggtgcattaccaggcagctgttgatgccaagttgcccaccctgacacaactcacatctctagctccctcccatcctgtgattgtgataccatttgactgtcgccgccattgtgggagaaacccagcctatgtgcacatggagcattttagtgttccagctgtaggcttggccttctaccaaagtgtcttcgtgtcttgccagccacggctcattaaccaaatgatctccaaactttgtcaaaaacatggagatacaggaaaaggcaacatctcttctgtccttaaacaggtggaggaaaggatgccctggtccaacttgtgggctgtttatagtgacctccctccacagagtacagcacagggggatggggaaaaggtgtgagcttacagtacggagctctgatggccactgcctcagccagtcagtcagtgtcaacctcagtaattgaaaatcatgctgatgggttttaccttcaaagattatgctaaaagaagtaccatacccctgtgatcttctgctcccaaatctgcacagcagaagcacctaaaatgcaccagacaaacccaagtagtggagcatcccaagattcacctgactggtgtactcctcgcctctctaggttatcagagacaggcacagtgtgagcatctgtcacacgtaagaggacccaaaggagacaggagagctaactgtgacataggatcctagatgtgacctcaggttagaaaggggccaccgcagaaaaactaagacaatctgagtaaactctgggctgtatcacccgtctgttcatagtaacaagtattccacaaggtgttaactacaggggaaacagtaggctgtggagctgtctctgccaagtctgtacagtcagccgatggatattttatttcagtccaaaagttctgttaaaaaaaaaaaaagcaaaaaaaaaaaaccccaaaacaacaacaacaacaacaacaacaacaaaaaccctcctttttgtgtttagagctggttttgagcatttcaaaaccctgagctgcccttggcagattctgtttatcctcggcatcgggggatttatgggtcttggatttgactatgggaagagactccttaaagcccatgatacagaatattttataatgccgctggggatgtgaacaaggctaaccctctagcaagactggatagcaagattccatacaattacagtgtactttgggaactcttgtatcaaacctttgtagaagctggatgctggagctaatcaactggactgtgctgccagcagccaggcagacgggtggagggtcctcttccgtgagacatgggtgaagccgatgacagtcaggcacccattgtgtctcctcagcagttccttgaaacatcaaacacttgtcacaacatcaatgtgagtggcatcctttctgcttagacaccatggtgaaaccagagcaagtctatgttgttgctgttgttcccacacatggtagtccctggctatctttaagatttatgtttcaaagtccctggttggatgagaaaagctgcagttagtagcggatactatctaccagtagtgggcattatattggcaaagtattgtgaactgtttaggtttgttgaaagtagactatggaagcaaggggcccttcctttgtttcctcctctctctccctgccctgtcctgagtcaggctggcccctggctttgtgacagagagagagagaaaaaaaaaaaaaacaatgtgcatataagaatattgaaaacattgcacccttgagaacagctagaagagaaactattaccaagagacagagacatttctgttgtttatcccatggcataaacacagcagtggtgggaacggatgccagatggtcattcaccaaggaaaaactcaatcagcaaccctagctgaccattgcaatgtctctagttgatttctgcttacgtgttgataagccttgatttgacgaccttaccttggtttgtctctatcaggactgttccagtcttctgtgctggcatctgtagacttctgatgtgatgatagtttgctatctcttgctgtttacacccatcacttggtatttgtcctttgatttgaaatatacttaataaattccttcattcgacatatcatgggccattctccacactgtacaggacaatatttgtaccactgtttcttctacacgtcctgctgtgttgccaaataacaccaaaaaaatatgtctttcaatggtctaccttctggtgcctctgtttatcccaaagatgggtggagaaagaccacagacccaaatcatcatggccaattaattaaagcaagctctttgatttgggtacacaggctacctccccctaaggtgggcctcaagaggtcggcactggattcaaggaagacaaggcttttatggctcacacctgggattaaaacaaaacacattcatataacacttctgtgtttttaaagaaaccaaaattctcactacgtgtgcttataatccagaattggaaggcagaagttgaacaattccagggattgagtggcctgccaatctagccaactggtgacctctaggtacagtctctaaaacaaacaaagtggagaaagataaaggaagacacccaacattgactttgaacacacatacacacacacacaaatgaatagataaataaaaaaatgaaacttcagtaattttcatttaacttttttcagactacagttgggttgggataacagaaactgtggggagcaaagccacagataagggggtggctactgtgattgttagtagtgccgtcttccatgcttgaacatgctgtgctttggattgtggttcacacagtcgccataactgtatcacagagtcttctgatgctcccaggctaaaacttccaggaacaattcctgctgctgctgctgctgctgctggtgctgctgctggtgctgctgctgctgctgctgctggtgctgctcttcctctttcttctttcttttctcctttttttcctttctcccccctcccttctcccccctcccccctcccctctcccttctcccctccctcccttcccctcctccccctcttccccttcccctcctcctccccctcccccttctcctcctcttcctcttcctcctccttcttcttctccttcttcctagacagcagagcctggggctctttattgctcctctactaacaataaaaggaagcaataccctgccctttcgctacagctgctgagcagccacaggggacagcccccacccctgtcatgagcttaaaaggctgcttggtccctggataaggagtgggaggcacagcctccatcctggtccttctgtcagggagatagcttttcctctagcccgtcatctcctgagcaacgccacgattcccccacttctttttagtcctattgcttgctgtgttgcccactgcggttctaaaatgtcagggatgtaggaatgtataaaatgtcaggccatctggaagaacaaccgggctgtgaaggttataacgacctccaggtgcataacctcactcaccccacacagataatttcccaagcccatcagtttcaagaatatgtcttttcctggggacaggagcagcatttaaacagaacagacccctgacagtcacctgttctccaaaatctggataagttgccctttagaggtgacatagaggcatctccctctatggagtctgtcagcatggtctcatgagatgccacactgagcattgataactaacctgttggaacagggcctggagcaagaagtgctttagttcaaccccaactttctcgtccgtggctatttactgcagtcctcactcgtgataaacatcctcaaacacttttctggccctatagattttgtcttacactaagtccataaaatttagcaattctacccttaagctccttggtagttctctgcagttctcaatctttctaatttttaaagggggcaccacccacttttaacacgtcatttgcacggttaatacagtcacagaagaaaatggagtttctatcaatggtcagttatggatggaggaagggctcatgggcctctagcccttcctgctgaactattgactgccatcagattctgggagtgagggggaaaccatcaccttcagtcctgtacccaatgctgaatccaccgtgcatcagtggataagtacacacctgtggtcggtcacgcagatggcccggtcaaactcagtgggttgcaaacaaaaagacatgaatgtgggaaagagataggaaagaagagaggcagctgggagtgggaaggagataagagagggtggggtggagaaaacaatcagaatgcattatggacatgtaataaagtatgacattgcccaaaaataattctttaaaaagaacatggagtcttacttccaaaaaaacctcttaagctaaggaccagctgttcgtattaatgttgttggttttttttttttctttttttctgatgaattctctgatttattgtaaaatcctattttcccagggtcacaaatctctagcggcttccacaacttgcaaatacgcacttgagcctaaacctctgctaaggctggcgataggatgtggtcttctgcattgctgtggccaaagtgattgtaaaattcataggagagatcaagccctggttaaagacagcagcgaaggctgctcagcagtgtgagtgcctttaatgctattctgatgggcgtttgaaactggcgacagtaaaacctacaggagacatgcttctctataatctttaactatatggaaccatgaaaatcaggagcactgagggacaaggagagagagagagagagagggagagagagagagacagacagagagacagagagacagagacagacacagagacagacacacacacacacacacagagacagagagagacagagagagagagacagagacacatacacacacacagagagagagagagagagagagagcatgtgtgcttttatagatgctacagggtgtggctaaaaaaattaaatagctaagaattaaagaagagaggaatttctagaaaaatggttttccatttcagattgtctgacaggttgtgggcattcatgagaacagatatgtcatgaccttgctgtccatccaaagaaatggtatgtgtgtgtgtggggggggggggagattatcatagagcctcaacagataaaatttcattatcaaaaaatatggaaataagtggcaagtgtattcatttatttaacaaacacctactgcacgcctgacatcatatttcatgatacctaatacaatatgcagtattaaatcagctatcgattacatgtgtagttaccacgtaatatttcatttttatatatctaagatgtatgactatttaaggttgctaagatccctagtaccgtgagtcctggattgctgtaaatttacttcatttgcatgaaactttgacagaaagaatgcatagaggatcacaaggactagagagatggctcagtggttaagatcactttctgcacttgcaaaaaaaaaaaaaaagtttggtccccagcagttcacagctgcctatgacaccagctacggggatctggtacccttttctggtctctacatgtacatacacacccccccacacacacacacaaaccccaaagccaagaaagtgtgaggaacaactggaaggaggcttgaaggagagcaggcagctgttggggtttgagcacacaatgatggccatgtgaaaaagttagcagcccaaatgacaagatgccactgtcacatcgcaacccaacaggaaggcacatctttcctctgcatgcatccctccccacctccccatggagaaggaagaatctgattggcttcctgacacagactgggtcatttcccagcatgcatagggctcactggtgtgttaaagggtcatggcacactaatggggaccacagtagttaaaagcttccacattgtagcttgctctaccacttatgtgtcatgtgaccttgatgaacatatttagtctaccataacttccatcttttcattgcaaaacagagaaaatagggacttgaatcataacataggcatatgcaaaattacattattcatggaaggtcctcagccagggccctgatacctgacaggaatctgatctgaaccaatcactgtcaccatcctgtgttggaagcaaacccaatggcccactctcctgcattctattttcttgaattaatgccagctctgtggcttgtttcctacagcacacccagcaccaggattcagacataaggaaaacacagttgcatgcttacattgactttaaccagtggcccagccagtgctctctagccaaagtatcagcaactgtcctcataattcaggacttgaactatcatttttaaacggtagcatttctccttatgagtatatcttcatcaaaaaaaaaaaaaaaccttttgagctgctgggggtaccttttcaaccagaaaagggtgtgtaactgcaagcgagagaagccaattttgactcctggcacatatgcaaaaaccaggcttggtggcgtgtatttgaaaccccagcactggagaaatagagtccagagcacccctggggctccgtggcaatataacctactgtgcaagctgaggtcccagtgagagacagtatattaaacaaaggcatatgggttccgagaaatgtcacctgaggttgacctctgacctccatacagatgtacacatgcatatatgtgtacttccatgcagaatatatatatctacacacacacacacacacacctctttataggatagagatagaagaatgagaattcctagatccacagcctaaagtgttacgctgtgactgtcattgtgctggattctggatcctgctgagaagaaacaagcctgacccctttgacatctgcttaattggttcttgtcttagttagggttttactgctgtgaacggacaccacaaccaaggcaaggacaacatttaattgggggtgacttataggttcaaagtttcagtccattatcatcaaggtaggaacatggcagcatccaggcaggcatggtgcaggaggaactgagagttctacatcttcatctgaaagctgctagcaaaatactgtcttctaggcaactaggatgagggtattaaagcccacatacacacggtgacacacctactccaacaaggccacaccttctaatactgccactccctgggtcaagcatatacaaacatcacagtccttaaacctatattatgacagtccttgccgtattaggtttgactcttggttttcttctctgtctccctctgatacagtcctaagtcatgtcctctaatctctcttagtgtcaactaaagtgggaaagatggaggcataaaaccatccaccaagaactggctctcctgtgtggttcctctttcggtgggtcacattctacaaaacttaatcctgtctgtctaaatcagttaacctcaccttagtgttgaatctgctattaacctttctgctggggatttcatttctatttgtttttctcactggtgtctttcctaaacctttctaatctttttagatggtgtcacactactttcttgggctttcaatttattattgctacattgtatataagataacaccatcatctgagattcttagagaaaaaaagcataccacttgttgcttctagtaacttgcctatacatatttgccacttgagaccttgagcccagattcatatatgtgggtgctcggaaggtttcattcaaagttcgttccttcagagagaatttttcctcctctcacggtcaccttggaatcactttatatgttctcattgctttggaatttcaagggctatgtaaatattggttcaggccgccatacccacaggtgtacactcattatttttaagggaacactttattcactcagaaccttggctgtgacacacatttccattatgaagcatgtgtttttctagcccgtgttttcactgtttaagatttttgtctttatatttaaattcttttattaaaattttttttcatgtcctacttggttgtaccctatgtctctgggctatctagtctctggtttcatgggctatccaggcagtgtaggacatggggctccctctcatgggatattcctcaagttaaaccaaccattggttggccattcccacatgttctgcgtcaccactgccccggcatgtcttgcaggcaggtcagattgtgggtagagggttttgtggctgggttgatgctcagatttctctttccatagcctgcagagtaccacccacaccaaagagactagaatgtgggggtgaaggctccaagcctgtactgcattaggttgctacattgccccccaggtgtccccctattccagttctctctctctctgtactccactccctccctccatccctttcctccacctgacctctcctgctcccatccccaaccacccccagtctacctagagaatctcttctatatccccttcccagggagatccatacttctctgctagagccgcctccttagctaacctctcagggtctgtggatcgtagcgcaattatcatcatttacttaacagctaatatccatgtataggtgaatccataccatatttgtctttctgggtttgggttacctcattcagcatgccttttatctagttgaatccatttgcctgtaatttcatgatgtcattaaaaaaaaaagcccacttagttactccattgtgtaaatgaattacattttctttatttattcttcagttgaagggcacctagggcatttccagtttctagctattatgaataaagccataatgagcatagttgaacaagagtccttatggtaagatggagcatcctttgggtatatacgcaagagtgctatagttatgtcttgaggtagatcgactctcagttttctgaggaaacgccatattgatttccatagtggctgtacaagtttccactcacatgagtcccccttgctccacatccttgacagcatgcgctgtcacttgtgttattgatcttagccattctgacaggtagaagatggaatctcagggttgttttgctttgcatttccctgatggctaagaatgttgaatgtttctttaactgtttctcaaccatttgagatttctctattgaaaattctctgtaccccattttaactggattatttagtttttaaatatctagtttcttgagttctttctttattttagatattagatttctatcagatgtggagttggtaaacatctttttcccatttcataggcttcctctttgtcctgttgacggtgtcctttgccttacagaaaaatttcagtttcacaaagtctcatttattgatggttggtgataccatatgcactcactattggtgttctgtttagaaggttgtctcccatgccaacgcattcaaggttattcctaactttctcttctatcggattcagtgtttgtagttttatgttgaggtctttgatccacttgaacttaagctttgggtgataaatacggatttatttccattcttctacatgctgacccatccagttagatcagcatcatttaatgaagatgttttcttttttatcattgtgtatttgtgtgtatctataggtgtgtgagattatgtctgggtcttcaattcgatcccatggatcgacctgcccatttttataccaacaccatgcaactgttaccactattgctctgaagtgcagcttgacatcatgatggtgagtcctccggcagttcttttattgctcagcattgttctggctgtcctgggtttcttgttttctatacacagttgatacttgttctttcaaagtctgtaaggagttgtgttgaattttggtgggaattgaactcgtgtcctcacgcttgcacagatggtctgccttgcctgttaagccagtggttctcaaacctgtgggtcacaacccttttgggggctgtagaacgatcctttcacaggatcacctaagaccctcaaaaacacacatatttacattacagttataaagtagcaatgaaaataattttatggtttacaacatggggaactgtattaaagggtggcagcattagaaaggttgagacccattgtgctaagccatctccctagcctgagaatatgtttattatattttatttaatgtttctaagtgtgttctattgggaaggctttcaaattgctactgcatagcaggtaatggagaataataatgctattgggaagtacaggaggttttactgttgtttaaaaggtttataatctcttaccgcatttatttggaaatacatttaggaagacagcaaaatctttaggggctggagaaaaagctcagcagttaagagcaaatcctgctcttacagaggatttggtccccagcacctacattgggtccccgcccccaactgcctgccattctagatctgggggatccaccacccttttttagcctttaaggacaacttcacttacatgtccatatccctacatagacacacacacgtaaacatataatttgaagtaaaaataaattttaaaaaataagtaaaatttctttaaatgttcaattctgctcagtcccagatactgcacagttatgatagatgtcattgttcttgttcatccaagtttttgtggtggaaactctgaactatgtgaatacaaaactcaacagaacaggaaaaaaaatgtggtgaaacaagaactggagcaagcaaaccacccaagacaatgattctcaacctgtgggttgggacacctttggggaggatcacatgtcaaatatcctgcatctgagatatttacattacaattcacaacagtagcaaaaatgcagttatgaagtagctatggaactaattttatggttgggggtcactgccacacgaggaaccgaatcaaaggctcacagcattaggaaggttgcgaaccattgacctaaggggggctacatcttttgagaaagtggaggggattctttcaaacatccctcagaccaggagatactaatttcccaactgtggttggtagagggatcccattgactttagatgtctaccaggtagacatgtagtcagtagagtctttcaaagaacggttgcctggcttgtagtctgagaaccacatacaaagcttatttgggagaatggagttggaatttttcccttaggttttgatagagttgtgtgaggtggagtctggaaatctgtgtttttaacaagcatccctggtgactcttaagtacactgaagtggagaagctctagagtgtatttttatttgaacggagtctgttgctataattccaggagccccgctgatttgcacagttggaataaaaagagtcaaacaaagatctgtttctgcgcttgacatgaaagtctccaggattctgttacgttaaaccctcagatttgagccatgtcagaaagacaattaagacagacagactggtcattagttcagcagtttgcccataaatacatgcctatctaaccccctcccccacccactatcacatctaggtgcagaagtgcccaacaaggattataaaagggaaacactctagaatcagagcaaagttgaaacttcagagcatgtcttccttgggaaaacctttcccactgcagtttaggaaaagatgtgtagctagtaacattagatacattgtgtctaaagccacgtggtactgtcggacaccacatctttcatgtagccattacttacttatgtccatttcctttcattttgtgggtttggttatggtccctaaattatcaaatccagtccaaggtagaagaataccttcaggggctgggggcatggctcaataatggtgaacttcctaaatgtgaagaagggagggaaggagggaggagaaaaggagggagggagggtaccttaggaaattttatacagagagtataactacaattctgctgctccgggcaggtacacgtcacatctattcaaatgttggttaaacaaggatcactgaagtgttaacagaaaaagaaatactacctaatgtggtaggtgtgtgtgtgtgtgagtggtgtgtatgtggtgtgtgtgtagtatgtgtgtggtgtgtgtgtgtgtgcgcgtgtgtgagtggtgtatgtgtgtgtgttgggatgatgcgtggtttatgggactaataaaataagttaagattagtagaggattaggcttgggggaggagatcatcacaagtgcagaggacctggtcctttaaggagtgttgttaagatagaatgcttaaaagaatgccattcattgggaatgtctttttttttttttggagagggagatggcacatggaggcatttcaaatgaagaactttgttgtcattgtttctttgaagcatcatttttggtttgcaaattacatgccatttttttacagacaactaaagaaacgtgatccaactgtattcctctgctgtcccctgtttgagcgtttccatatggctaacatcagcccggagatttctttagaaacaattaaagatcttgccagatagatgggaagaaaccacgtgagcatgctccctgcttgctagtgacattttgtggcctcccgacctctctgacaaattgctccgcctgctgaagcaagacctctcaaaggctgggaaatgacagcccttgtctgaggcatctcttcccacaatccaaattgggccttaaggaaacagtaacacaaagtagcctgctctgtttctatggcacccaagtgacagcagtaggaagtgagaacagctggcgctgcctaccactcaaggtaaaagagttgccagtcaattaatagaatatggtcccacttaggagaccatgctaatcaaggaaagttacgctctctgcaggtagcattcacttgaaatgtatcatggcttatagtctcaaagactcatttctcactgggactgtcatttgtgggtaggagtaagcctaactggatgcttccattccagctctggggaaaggaacagtggagatcccagttaggactgggagatcctggagccctgaggccaacttccagggataggaccagactcggggatatgtgctcataagcacaggtgcctgcagaggccaagtgtactgtacagaaggtggtctcctgagtgaactctcagctggagactggctaggacagagggcatattagtgagggatagggaggcaaagggccaggcatggctgtctccatcagaccaagcctagtgatgagaagtcattgactagtggaaatgtggcatgccctactgaacaaataagaagtttggagtatagggtttaccacttcatcaaagttttcttataaactctttctgtctgacaactgccccttgcgcgcacacacacacactcacacatgctcatccatctatttggagaggaatcaattgagatgtcaagtattggataggaataggattttttgtgaacgggggaatgatagaaaaatccaagtaaggaatcactctcccccgggtggttttatttgaggttatgtgtatatatgtacgtgtgtgtgttgggggtggggtggggcatgtgcacataagcacagatgcttgcagaggtcagaagagaacattgtgtctagacagtgtcttcttgccaccccaccccaccccacccccagagggcaaggacagagatgacgggacctgctgattcttgcaagtcctcagtccacatctgtccactctgttgcctgagaatgaaaatcagcttctaatttagtactctttgggtatcactgctttctaattttctcctctgtcaggatattaccatcaggcaaagatttatatagcaattttcatctgagggagatctctctctctctctctctctctctctctctctctctctagcagaatgaatatctcaaatcaccactcactatcataacagcccttcagacaggtcagatgcacttactgcgttgacttactctgagtatcaaatcccagaggcctctgaagcctctgccctagagaagaccaaggatctggtggtccaagaaaactaggacagccttacttttaaattaaaaatgtagagatcccaaatgaatggttcccttggggaatatagaacaagagtttgtcttagcttccttgttctgctgtttaagtcattccaaagtgagcattgacacccaaccatcccagccaggctgcactttgaatagcatcacaagccccgagtccctggtgaacctctctgtctctgtctctatctccatctctgtctctgtctctttgtctgtgtatatgtgtttgtagtgtgtatgatacatgtgagttcatgtatgcgcagggggtatgtgcagggcatggttgttagaggcccatgttagttgccctcaatagatttccaccttatttttttcatacagagactcttattgaacctagagctcactgattccacttgtctagctggccaaagaacatcaagaatcccttgatctccacccctgcagggaaacctctagtttctttggaaagttagttatgtcaaatgatgtttttctggggcacacaggtgaaaggatgtcttgctaaagcagacacatgaaagaatgttttgctgaaatagacacggggaaagggtgtttggctatagcaaacacatgaaaggatacttgatgaaggagcataaatatgatcccacagacagtgggagacaagcactgagctttgttatggttgttccacctctctattcttccctaacaatgcgcatacattggatcaccttatgtagcgttgttgagctcaacttgtgataacacagccattgagagaaacttgcctaagaactgcttgtgaggttcctgtggcagcttgcgtcttccctggcctagcctcaggccagttggcaagtctagccatttcttcaggtttgaattacagctgctggtttgtgcctggtgtttgcccacctagaggactgtcctgcagctgctggttcatgtgtggtgtctgcctgcctagaggactggcctgcagctgctaagtcatatttggtgtttgctaaaggactggactcctgaaaaagatggagcttacccccaatgaactattgctaacaggtccactgcccccacatcctaataacttttctcttcactacctctgctgggtggtgggctagaggagaggttggacccttattaaaagtaggttgcaaaaaaaccaatatgcctacaaccccttcgatatgtgccaccttgcccagatttttatgtgacaggtggggatctgaacccaggttctcatgtttgaatgacaatcacttttaccaacagagccatcttcttagcatccctcaccagccctgattttatcagtgagttcatgttttgttttgttttgttttgttttttttggttgttgctacaacaaacagttctcaaaatcttggtgtgttatggcatcacaggcttattcctagctgaggtcacactttggcatgcttgagcaatgtcctctgctccatagaagccccacttgagtatgtaggctgatatttcagcctgacagcaacagcaagggatggaaaggttgcaaagatactgctcccaagtcaccacctcccactgaaaaacagacagatagatagacagacagacagacagacacacacacacacacacacacacacacacacccttctcctcacctttcattgactagagcatgccatggttacacttaacttccccaaactcaaagtgacggtggtaatatttaccacacccactatggcacccaagcttggaatgccctccactttggttctgatttattagactggctgtcagcttttagaacacgatgtaatcatatttcgcttggtctcttctaactcggcagcatcgctgatatcatctgagatctgtgggttggagctaagctcttcactgggacaattttttcctcctcccagctctggcttcctgtaaaacagtgcctttggtgttgtcaaaagtgcgcctgtttttcctcctgtgttttctgcctttcccagccccccacctgggtctaattgtgaggagcatctgcatgttttaaaggctcattatgtaaatgtatcagagtccatatccatcaacagataattaagaagactatatacatatttatgagatagcttaatattgctttaatgaggaggtttactggaaatatcaaatcaaggaggcaaaaaggaaaaaaatgatcagaacaaaaaaaagcgtgcaggctttcatcagtccttggtagttctgaactgtcagaacactcaaaggcttgtcagaactcagatttctgattagcctaccatacatggtaagaagccagccgctaggaagatgggagagaaactcgctccagacttctttgaaagcaaagctttcttgtttcaaaccagagacttctcaaggagccagcctcctgttcccacacctgggaaagcgttcaccacagggagtggctacaagtcccctagggcagtctctagctgaagccagagagaggggaagatgtggctatttctcaagcaggcaaagcccagcaggcaccggccttaggagtaagaagaggtatggtccggactcctggatgcctcttgtcctgcagccaggacacagacaggtgctactagcatgaataaaagcccagcttccctcactttgtgggccaggcatctctgtgcagcacacagtgtgcacctagccatgtctagaagccccttgtgttctcaccaggagctagcctaagtctgcaggaacagtgctatacccgcatgttatccagcaacctgtcccttccatttgcctaggtatctgctcaacccctcactgggcacctctgcacccgccattctataggccagtctttggtcaccatgtgtcaccaaaatacaaagaaaactggaaagcacaggcttgctaggtggtcaggaacaaaaagaagctagaattgttcatcacatagccttgtctctggaatagtctgcctatctggccaacaaatacccatgtcactctttatcctcaaatcttcatgtcaactgagaaattccaaagaccctctgggtaatttaaatagctcagagccaaggacttccgtgggttggccagaactcaccactgaatttagactagcttcctcttgtttagagacctgtgaactagaaaaaacagaatatcgattatcccttgtgatggtttatatatgcttggcccagggcgtggcactattaggaggtgtggcctttttggagtagaagtggcctgttggaatgggtgtggcctgttggagtaggtgtggccttgatgaagtgggtgtggcctgttggagtaggtgtatcactgtagctgtggacttaagaccttcatcctagctgcctggatgtcagtcttccactagcagccttcagatgaagatgttgaactttcagctctgcctgcaccatgcctgcctggatgctgctatactcccaccttgatgataatggactaaacctataagccagccccaactaaatattgttattatcaaagttgtcttggccatggtgtctgctcacagcagtaaaaccccaactaagacatcacccatcatgatctatacacactgctaaagggaagtgcctagcccaaacgaaagctgccattcaaacacgtgagacatagaagaagcaaccctgtctatagcagttctgaaatgctggcggcaggggaaattccttgatttgatccagtacatgcccctgggaccctgctctgcctgccaatctttgtgtgtctaaactaggatgcagcgatgatacctttgggggagtgccacggctttgggacccttgtcttcttcctagagcagacttacaaagctaaggtggttttaaaatagcaaccaccaactggttccatgtgctccattttcatttaagttcatgcttatggtttctttgacttgaacaattccctagcatagagctggtactttgtcaggactcactctctctgtgtgtctctgtctttctctttcctctctctctctctctctctctctctctctctctctcccccctccttgtcccccttcacgtatctccataacccatgccccagaattcatccacacggtccatttaactgcaccaaagtctggaaaataccatctcctttatgtgctcacaaagggaaagaaacggggttcaaataactgccatcatttctcccctgcccacaaactgccatgcctgggaccatgcaacccactaaaaagagatctttggagtgaggtaaaacctttctaaaacaaaaagtgggtattgtttccagaagaaaagaagatctgaagtcgacaaaacagaatattctaactaagatagagggcttcagttgcttccacaataaaagggaattaataccagaatttccttcttaaattgtcacaaacttctatcagacaatgctggccaagtactttgcacaatatcatgtaagaggaactactagaatatcacagaatggtcaagacatgtgaggctgagtccataaattcatctaggcaataaattcattttaccatattggaacctaacagcattaagcctgtttctcctggtgacagaaactgagtctcaatccatttttagctaacatctacaaggaaaatccagctacaaggaaaataagggcagagggtgagaagtcttctggccttctttgttactctctgcccattgaggtagccttggctactatttgggtccctggtttgtgtggatggtatcttgttcccaccactaaccatctataggcctgcaaataccacatgctatatctggatgattccaaagtacataggaaacacccctcatattgcccagattattctggaatgttagaatcctcactgaggcagccttcgttcattctgtctcaacttgttccactgataggcctttggctctcagatctcattggtctagggatccaggatccttcccaggccctgacaatgcagctcaggtgtgttctgtcttctacctgggtattccttcacaaaaaccaaccacacccttcccctaggctctgttgaagaagagagttcccatagcctcaaagactatgctatccagacctatagacactggccaaatgttgctatttaaaggcacaggaagagaaagttgtattttcattgaattgtgctgggcatatttcaaaggcttcttagtcatgtggacagaggctagcactctaaaggtagcttgtattgtggaacatttctactgcccagagaactctatcagatagcactggtctaaggctgcttcctttctaaggagcatgggtctgcacctcttcccctcagaatctttactgacctgaggaagaaggcttgcttgcacatggtcttccaaccttatgtacatcctgcctcatgtttcacacttaggtttagaaactcataatccagggagtgactcccgtgttttctatgctgtactggtcagtagacacactgagagtggtacgtctttattgtaagtagagggacttgttattcctatttgctgggccaagaggatttgtgggacatggaagccatgagagaagtcccagacagtcaagtccccctagctacagagaagcacagcttgccaatgtccactgggggagggggcagatatctatttttattctttaaaacgtacctcacttttgcagccatttttaatttgacaaaagtcactcattaacctcctaaattagactcagatagttgttcttctctctctagagcactgtttctcaactgtcctaatgctttaatacagctccacatgttgcggtgaccccaaccataaaatcatttcattgttacctcataactgtgattttgctaccattatgtgtcataatggaaatatctgatatgcaggatgtctgatatgctacgcagaatatctgatatgaaactcccaaagaggttgaaacccataggttgagaaccactagtctagacatttccctggctctcacttgcccacacccttcttctctagccccatgagttccagaaattttggttggttctgcctgatgttaatagtgtggtattcacatcatgttcctgtctcaccctcaccaggggaacagttagaatgtcagacatttcacccttctcttggggaaaaaatgattaatcctgaggtcagctaacaagcctgatgtcccctttgctggacacacacagtcagggctcactccacaggacccctgtgaacattaacttcagccctttggtgtgttgtttattttgccccatttccaactgacatagcaccaggttcaaagagaaaagtgactggagagaaagagctgtcaccccccccccgtgaatgccccccctcaccccattccccactccatcctctccctgacacctccctgtcctggatgattaagtgtgtgagccacctaaaaatatctgtatagaagcagagatgagagagagaaaatgaactgttcgtgaggaagacaaatggtatacttccaccccaggcagtcccttggaaggtccttggctaataaccaccacccatgaacatggtttctgctgttctgttcctgcgatagacacccctccactaacaggctattgcaagtatagcctcctccaggaagccactcacaattcgcattgctcaaacctttgtcacagctgccaacctcatggaagattcaaaatacaaagttgttttatgtattcccgagcagatttgaatcaaactctttggatgaaagagctaaatgtattggcaattctagggtctgagtctatggccttgcgaatgctaggtaagcattctaccatcagtgaccataaatgagctacatccctggcacttgttattctgaagcagaaactctccatattgccctgcctagccttggtctcttcctgtagtctgggaatacctagaacttgttatccttgtgttcattgcataagcagaagggtgcaacatgtggtcctgcctgacttctgtcacttagaggatttgtcaagattcatctacattgtactctcatggacctgttttccatttccttttctgtccaaataatgtcccattgtatgtacatgccaacttctactttcccagtcattagttgctatacatttgggctgtgcctgctgtcggctatcatgaataacgctgctatgaatattcatgcacaaactttgtgtgcacatatgcttggctatatgcccaggcgtataattgctggctcatacagcatctctaagttttttgaagagcaactagacttttgcacagtggttttatcattttacattcccagcagcagtgtggaagggttttggattcttatccaatggttgttattgccggccttttattaaaaccatcctatcagctgtacaggagtatcttcttggtgctttgatttgtaagtctttggtggctagtgacagactttcttatgctccttggagtttcagattcttttctataatgtccatgagacagtgataaaggtacctgtctcctggtccctgctcaatggtcatctcccagtaggtctggtgcaaaccatatcctcttagtgatttcccagtgccaactctatttatgtcactcaccataaatcaaataatgagttgccaaacctcctagctagttctagtctggatggagaaacaacagtgggagccagcaacgtgactgacaggccctgcatctcatgtcactgagacgtggaaatcagctaaacccaaatactccattcaagccaaagctaccattcaaaaccaggcttaatgctcttgacatcaggtcactggagaagagctagcgactggtgaactagtattagacctacaagttacacagattaattcactgaaccatcccagctctctgagacagggatggttgtgtcttaccattttgcagataaaggaactgaagcgaagaaaaggttaataattatatctagagctagtcaacagaaagaagtgctgcccacatcgaattgaggttgcccagtgccaggctggacgataatgaacatggggtgagtaaatgaataaaattttaaaatcccacaggggaagccaacgtctacagaaagccaactttctagaagaccagaacaaggagtcttatggggaggaggctgtctctctgaagggcatcttgacccctgacaaaacttacaacttctgatatgggtcttggaaaattcaatggcttggggttttatttcgtttcattcttttatagattcatcctgggaggtggtagcacacgcctttaattccagcactcaagaggcagaggcaggtggatttctatgagtttgaagacaccctcgtctagagaggaggggaggagggagagaaagagtggaagacagagagggagagggagagagagttcaggacagctaggacgacacagagaaaccctgtcttaaaaatgcttttaaagtaagattcatttatttttattttatgtgtaggagtgttttacctgtgtgcacatatacatgtgctgtatgcattcctggtgcccataaatgttagaagaggacactgaatcccctggactggagttacaggtgattgtgagtcaccgtgtgggtgctgagaaccaaacctagatcctctgcaagagcaggaagtgctcttagccactgagtggtctctccagtcctaggcttgggttttgttttgttttttgtttttttgttttgttttgttttttgaacagacacaaatcctaagcataaatatggtcactggaaatggaagcagatgcattgtgctgcaggtgtgggtcatcaagtgttcctcgggcctcgtggggatgaattggcagtgaggtaggaaggagaaaaagggtcttgatggctctgaaccaagctatttattatttgagatttaagattaatttaggattaaagctggtgcagagaaacccttcggtacaccctgccagtgcagtgctgtgtaccctctgattctctgtgagttagtcacaaagtaacacatttctctgagaagggcagatggcttagtgagctaaaatgtggctggatgtcttggctgggtagttcttgtagtaccctgaacaactcggtatgagatccctgaaccatcgccctgaattccaacgagtcagtaatctccctttaatggctacacagtctgaggctggtgaatagaggaatcttggcaatcgaggaacaactcgccataaatctaaaagtgggttgccaaaagctccctgctcgttctactccagatgaagaaacaaccacaggagccagcaacaaatgactcgagaggacctttgtctggcaccatgagatggagaagccagcggaagccagacatacagctcaagccaaagccaccattcaaaaacagactcattcatcttgacatcagtgtctgatccagaaagccaggatgctttgcagcctcaaaatagcacagagcaagaaggagacgggaacactgctgctggggagccctgctgctggggagtactgccattggggactactgccactggggagtactgctactgaggagcactgcagctagggagcactgcagcttgggagtacaagcagtctgatcactagacccagggcatcccccgaactatatactgcttcacaggcagatgacaaagccacctgagacactggaactgtggtcacagatggaggagcagtgttgagagataataaaaggattgccacccatgggcagaaagaaaggaaacacatcgcagacagtccatgagcatggcacaagactaaccacattggtaattattactggtgttcagtgtactgataagaccactaagcttttaggtgtgtaccaaggctctcccttacaccatctcactttcattattaagcaacacgacagtccttagagaccgtgaatactcgtgggagcatcttgaagggctctgaggagagaaactttgggaaggattctctaactcttacccagtggtagagctgagtctggagctctgtaatctccaaagcccaaagccccacgcatgaaaccagacataatactcccacgaggacgattagtcggtaaagatgaagtgtggagggactctggatcacctatgtgcctctgaggtcacaatgggtttttgaaatcgtaagtgtatatgctcttgcctatctgtgcatcaatacacgcgcacacatgtattcaaggggctattaaacagcctttgtcttccttgttacacttaatattcccaacaaccttgaaaaaatgaattatggaagatttgttctaaaaacagctacaagaatatcttttatctctcttgtcttcatggggagaaataagtttgtgtgtatatgtgggggggggggcaggggtcaacctcagggttattcctcaggcactgtgagccatttttctctcattggtctggaacttgtcaagtaggctggaaccccaggaagctacctgtctctgactcctcacaggctgtagggattatcaaatgagctatcccctcagccctctcttgccttgatgtcttcaattctatcactaagatgttggttctaaggatacatgctttgcctttgggctgtttgtgacttgctttttagtaaaaaaaaaaaaatagttggtagattggtaaataggcagataggcagatgatagataggtaggcaggtagatagatagatagatacatagatatatagatagatgacatacagataataggtaggtagatagatagatgacaaacagacaaagataggtagatctttggagagatagatttaaggaattatctcatgtgactatggattttagaaagtctaaaatctgctggtagctaaccaactgaagagtcaggggagcctagatttgattcaaaagttcaattccaaagacatgtactgaagaattatttcttgaccaaggaaaatccatttttcattatatttaattctttaactgattggacaaagttcaccacctttcgtaatggaaggcagcttactctgttcaatgtttaccaatttaaatgttaattccataaaaaaaaccacttcagagtaacttgtgaccaatgatctaggctccatggtgcaagccaagttgacaataaaattaaccatcacattgaaccctgttaaaggaaatttgaacctgcttctagttagggtgcaactccgcccttagcaacacaactttaattcctctggctggaatacagacatgcccttagtatccaccttgaatcccaaacaatgaaagtaaagttagtttgtagaaggaagcaccatatttgaaagtgatgttgaatttcgaggcagacaaagtgatgaatcagagaaagatttgacagaataggatatacacaactctcacgagaagagagaggagagggaagcagttaagggagagacagacagacagtacaggagaagagatacagtccaggatacagtagagttcatggagacagtgcagccgagttgagagggagagtggaacagcacagagaggcagaaggagaccgttttactatgagttctacagacacaggtgaagacagaatgagccagagaacaaggatccagaagattaggacagattgctggagttagtctgaggctgagcagagcagttcagggtcaagagaaaagccagactggatcggtcagctgggagaggagtttgaacctgaacagctgagttgttgaaccagcaagctagggttcagaaagagctagaaaggggtgagcttattaaccagcaagtcccagaggctgaaaacattctagatctagacagattatatggaggcgaaaagtttctgggactgggcctcggttagcagacagaggcaataaacctcccagacatcaatcacagcaggaggataaaagttgcttttacacctaaccatcaacatactgcactggagttccaggatcatgaaaagtagcaaattccagccatggggtttcaggctgtccggtggacgacaaggtaagaccaacaactgctagtggagcttacagttttgtgagtttaaaacataagcaaacatatagctgttgcacattaagaacaggatcagtcctcgggtgccttactaaacaccagaaccaaatccctatggcacagtcagactgcctccttttctactctgatttgctggcagcaatatctggacacatcgctgagctgttttgtgcctggatttctctgtctgtgaaatgggcaggtttgtgcattctaccctctccgcccactctggtgctgatgaagagaagggaggaataaaagtgccatggtggcagaaaagtcctgagggctgctgtataatcaaacatggttcctgtagagcccaaatgcaaaatcactttaccgtgcaattctgaaaaagagacatctggcctgggaaacctaaagaaaaccacaatctttctgaccaaagcaatttcattgaataactggtcctggaggctctcctctcacagctccaattcacccaccaactcaagtccacttagaaacacatcagttttgttgtctctctctctctctctctctctctctctctctctctctctctctctctctccctctttcttgctctctctcctgctctctagctctctctctctctctctctccctctttcttgctctctctcctgctctctagctctctctctctctctctctctctctctctctctctctctctctcaacatctgctatgtctatttttacttttggccaaaatagaaaaggaagccttttaaatacccttctaaatagtagctttcctctcccctcaccaaacattccagcacaaagtatagaatttcgtatataattgcagctacgccacaagctgctacagaacagaattgtgcaggaattttagacatgacctcattaggctacagttagtctacaagtaagtaagatcccacctgggtgatgagagagtaaaacccaggaaccacatccagctacatctagccatcatctagaaacgtctactgccagacctaagccccatgtgaacactgtgctggtcaatattgattgtcaactagacaagatctagccaagctcctggacacacccatgaaggattttcttgattagtttatttataacaggaagactcaccctaaacatggtggggtgccttccaccagtggcccagaaataaggaagtatggagagcagatgtgcttcttgcctgcttgctttagcttctcactgctgagttcatctaccccgttctcccactgcaggtaccatcctccctgtctgctgtttccccgacctccatatacctactgaatgaagtcacagattttcccttcctgatactcagagagcttccgtctcccgcagaccaacagtcccagggctcagaaatgagagcatccatctacgttcaggtctctctgcccgccagccaactgttctctatcactatacccaatgtccctccaacacgaaccaaatggctgcctggtgatcagatatgacaggcaagaataacgaagcatggagagagctggagaggtagctcagtggataacatgcttgtaacacaagcatgaatgagaccacaggtgaaccctggccagaacccatacagaagctaagcaggcatgacagccacctttagtctattcctggggaggcaaagatgggagactctggtggcaagctggggtaattagactagccaattggtaagcactgcattttattgaaattgaaatgaagtaaagaagagaggaatggaggaagaaaccctaaatcaactttgggtctccataagcatgcacacgcacacacacacacacacacacacacacacagagagagagagagagagagagagagagagagagagagagagagaacatgtgcacacacagagaaacagatagacagacagcatagaagtgtatctctggtactatctccaagtaagaattagactttcaattatcacaggttcaaccagtcccctatctcaggacataagctagcactttgccctctggctatgtgcatgaggtctcaacagtactctagaagtacaggagtcattctattcctgagttctcttcccaaggctagcagggagggagaggagaagagaagggtgtgagcatggatatatcactaagaggcttcccgttgcatgtgacaggtgaaaaccgggctgaaactattagagtttctttttctcacctaacagtggttgggagagtcgaggctgtggttcaactgtcagggcatctctcagaatctctagagactattccccattagtacatgatggctgtcaaagcttcatatatcctgccttgacaaaaggtaacaaagcactcgaaagaagatctggattttcctcacaataaacatttccttgcttatctagattagatcttacccagaagctctacagcagagctcttttcaagaaggatccaccagtgttgccagggcagacagtgagaacctgcattccccaatcctgtgatgggaacaaacactgttggctgagagaagaggtgagaaaatggctgtatgatgggtaaccaacagcacctcccacagatggcctcccctagacctccctccatgtcttccttgctttgcctagaatatgatctaaaactggctcccaatgacaggcactgagaagtctaggaacactttcatgcatgttcttataggactgtttcctgagtgctcctgtcaagggaatattctatattaaccatcacagtaggttgtcttatttggagacagaatagttatataggcaattaagtaaaaaatgggttcgttggcatgtgctctttaatttagcacaggctttataaaccgaagtttggacagaaacacccacagttgaaagcccatatcaaaacacaagaagataatcctgtatacatacccaagagagaagtctcaaaaacccctcccttacagccctttagggaatcaacccaaccatgtttgggggttttgttggtgatggtttgatcgttttcccaggtcgccttgattttgtgatcttcctgtctctccccccccccccccaatacagagttattgtcttgaaacatcatgcttagtttctataaatatcttgatcttacatctccagtttgcagaaaaatttgcttaaaccgccaagattctaaactaagattgtgcggtgttttccttcactcggagactcacctgggttccagagagaaagttacagtggcactccaacaagcctgggaatttggaagcatgaggctgggtggcagggaacttagcgagccgggtggagagatttcagagctctgggtcagagagtctgccaggctgagaacaggctgcacaactagcatcctaatacataaggtatcctaagttataaatcctccagtagctgatcccggtggatccaccacctgaaccaggggccttcactacctacattttgccctcccacttactctcccatccaaaaagcaagcatccttctcctgcttctcctcttcctccctccgacctggaagttcttcctactcgaccagtgaaggttccttgaaatctttattcatgaggagaaagttcacctgcagtcacctgagtatgcaattcactcctcatcccatacaagtccctcttggggaagcagaattagcatcaaaataccaacagcaccagggcaatccacaatattgtaaccatgatgctgaaaagctaagaaccttagctgcctccttagctgcctccttggctgcaatatggaaaaagacaagtaaagaaatcaaatcacccatctttgagatctagacttctttctatttgttctgttacttaaaaaaaaaaaaaagttccccaaatacttccatgttgacagcaccattctatagcccggggtcctgggttgaacaaagagaagaagctgagatgaacatcaacattgtatttacattctggggaaggatgcagtgtgaccagctgccttgcatttctgttgaatgcctgccccaccacaatgttctgtgtcctctcaacttctaagtcagtgtttctcagccttcccgaccctgtgaccctttaatacagctcctcacgttgtgctgacccccaaccatagaatttgtttcattgctgcttcataactgtaattttgctactgagttgtagtataaatatctgacatgcaggatatgccaaaggggtcgaaacccgcaggctgagtaaaactgctctaagccggtataaactctcctccttcaagctgtcgttatcgggtatttagtcctaacagtgaggaaaataataaacaggggtccttaggatttcacaaaatgagtcttggaaaaaacaattcaacctttgaatcacgtcagaccaagaacttctttctctgtaatagaggaagctctcattaatctttatggagggaatcaatatgcaaatatccaccattttattaccaacttcattatctctagccactggaaatgtttagcagtcatgtctgcacatccacaggttactaagctgatatcaaggatgatgccgtggaaatgtatgaagcttccaagggccatttgagtaattggacaagattattacgaagctcggtgtaattttagtggtgagtctatttcattgtgttttgctaatataaaagtcagtcattgataaatgggatttatgttaaccaccaaatatttgcaatgcttgtttctactctagaccaaaggaacgtaggggtttaagtgccaggccccaaaataggagttcagtaacatagaatagaaataggcaaaagtgaatggggccaaaggagagcacatgcgcttactgtgggagcctttgcaactgcctagtgtagcatgaaattgtatttaaaattgcatgcgaccccacagtgatgaaaccaatacctcagaggctggctgacaccagtttagaagacaaaagagcgggccttaaataaaatgccagcatttccactcgggccatctgtagagctcagtggtccgccgcatcgtttggtgccttcaccatgagttctgatgttttcagggtgcttctcacagccaacgccagaaaagcctttagcaccatggaaacattgcttggtacaggctgtgcttgaggtatgtggtgcaaacaccaagttctccacccgagaagaacacagaatgtctgctggggtacccatctccagggcccccttgccttttctccgaagacctcatttctgttccactgagccccttgccacagcaggctctagagtggtggctaaaagaggtggctttctggagtcgaatccaggcttcaccacctgtagacggagtcattaaggacaatctcttatgtgtaaaatgtggatggctttcatggctattttgtaggtgtgtggtgaaaattatgcaagtaaaatgtagggagacctcttaatgcaatgcctgatgtatctaagcatttggtaacattagcggtcatgagcggtaacatatccaggcattgtgagaatgtttgggagcttgtgtgcatgtgcctgcttgtgtgtgaaacaaaatgagtgcatggtagaggtcaagctaaccaaggtctctctccagcttagatgaagaatatcattcattcataatggttccattttataagttggcattctattaagaattagatatatagatatagatatggatagaattttaactttgccttttatcactgaggttataaaacatgaattggtctcctttcttgattaaaattatcataagtttattatgtgattctatcccctgaatgttcctgggatgtgtggctcctgtactgtgtagtctcaaactgccctgtctgcctatagcccttggactgttgtctgcctgtgtttgtcccttgggctgctgtctgcctgtgcctcttagactgctatctgcctgtgtctcttggactgtcgtctgcctgtgtctgtctcttggacagcagtcagcctgtgtctgtatcttggactgttatctgcctgtttctcttggactgttgtctgcctgtgtctgtctcttgaactgccgtctgtctatatctcagactgctgttggctcctctgctgtcacttgtcactgctgataattactccttcatagaacagtcagtagctgagtcaagtgtgcatcctcaccccttcctcctttgagtaaaaaacaattagtctctgtggagcactcttttgactcagcataaagttctgtagtctaaacaggtatgatgcaaattcatgagcgtttacctaattgacaaaaaactaatacactcaaagcatagactaactactctttcattaagtgacttggcttccagaaagttctagaaagctgacggtgaacccagaaaccagtcagaacaaaggaaatgaagctagagacactatattttttcctcttcatccaaggcatggatgccactcagtttctctgggaacacccagttttgaagctgaaaggtggctcggccatgtactctaacaggattcaaatcccagcactcagagtgggtagctacaaacaccactgccaagggatctgatgtcctattctggcctccataaacacatacacactaaataaagtcaaataatttttaaccccatatcaacactgagtgtcgccatgccagaagcatcagaatgagctctgagtctgtcgggaccattaaaactagagatccaggggttcaaatgagtcaaggttaaatgtgcattgaggtggattttcctctctaaatgtaaatgaaacagtgggcaaattgtattcagcaaaatgccagatattgcagtctgtgcaggttctttaatgcacaatcttttctattattttaactttttacaacactttaaaattataagaattttaacccaagggacaaaattggtgcaatctggcttatagctgttgtttgctggtccaagccttacttagaactctaagatctgagtcctgaactgcacaatggtggtgtacgactttaatcccagcactcggaggcagaggcagttggatctcaagtttgaggccagccaaggctccacagagacacctggtctagcagggtaagggtgggagtgagagtcctgatttgctaccatgagcagtattaactatgtgagcagaaatgagcaaagtgagctcgccaagactcaggctccttacactagaatgagaatccaggattctctgcactgtagtactgttatctgggctgctctctcccagggcaggtccatgctggctggaattggtgcttgccgagccaccagtgagtctccactgaagcttttgccttctccatgttcttccaaagtcatttcagtgttaaaggtaggactgaagtgggagctggacctgtcccaaggaggcctggagaaacaagctgaccttctcccaacaactagaacggggcggggcttccatgagaattgttcttttgccacaggataccacacttccatggtaacaaatatggaagatacctagaggagatgggagtagagacaactggtcgacctcagtatactgcagcataaccctgtttaaaaaattagctcctctctgaacacagcctgaagggaaagaccacaacagtgatatcattgaccagaagacagaatgggtgcaaaatgaggcctgaggggagccaccaacaggaagacagaaaacaggtgtggctactgcactttagctttggctgttgggaggtagcttcgccactcctaggcactggcgccagctcctcccattgttgtgtgggaaatgtgtggactttccttaccccaaatcaaggcagtcatatctgtctccaggacctttccagacttcagcctgagcagtctttgctggctgacaggagcagcttgtctttccaatctcctgggcttgaagtgagagagaagtggattgtgtttcacttgttatgcttgtgcagcctaagaaatgggcaggggcatgcacaaaagcctgaacacacagtgaaagcagccccttccttcaggggcatgactgaaacaaagtcacagccttcattgcctcacactttagaaatactcctaattacctagttatgcatggttaagcaacatcattgtactagctggttttgtgtgtcaacttgacacaggctagagttatcacagagaatggagctttggttgggaaaatgcctccatgagatccagctgtggggcattttctcaattagtgatcaagggggatgggtcccttgtagatggtgctatccctgggctggtagccttgcttaagaaagcaagctgagcaaagccagtggaagcaagccagtaagtaacatccctctatgacctctgcatcagctcctgctttctgacctgcttgagttccagtcctgaccgcctttggtgatcaacagcaatgtgggaagtgtaagctgaataaacactttcctccccaacttgcttcttggtcatgatgtttgtgcagactaagacaatcattaactgttatttgtgtctaacttccatgagtagaattgtatgatttttatctatataaacctggcctctttgaatatcaaatcttataaggtactgtcttagggttttattgctgtgaagagacaccatgaccaaggcaactcttataaaggacaacatttaattggggctagcttacaggttcagaggttcagttcattatcatcatggcagtgtacaagccgttttggtgctggagaaagagctgagagttctgcatcttcatctgaagaaggcagtcagaaagtgactattttctctaagcagccaggaggagggtctcttgtccacaccggaaggagcttgagcataggacctcaaagcccacccacaccgtgatggacttcttccagcaaggctacacctactccagcaagaccacacttcctaatagtgccacttcccatgggtcaagcatactcaaaccaccacaggtaccttacctgttggagcctgacacaggcctggttgactttcattgccatacagagttctgccatttgaacaaaccctgataacttccctctctactgttaacagacatttgagttatttctaccctggggcaattgcaaacacttcagctgtgtggcttttttaaatcttatagcctgatgatatcagctcccatttctcaagttttccaggcgtgaaattgtggcaggaaatcctgtgtggcctcccttatgcaaagtgtcttttattctgcacctgtccttttctggcagtggcctctacttgactctcacaataagaataaagaaagctgtttttcaaaaaaaattttttttaatcaccaattgccttttagttagggtttttattactacaatgaaacacagtgtccaaaaggcaagtttcagaggaaatgatttatttgccttccttttccatacggttgcgcatcatcgaagaagtcaggacaggggctcaaacagggtaggaagctggaagcaggagctgatgcaaaggccacagagagatgctgcttactggcttgcttctcatggcttgctcagcctgctttcttaaagaactgaggacctccagcgcagggatggcacctccaaccataggcttggccctcccccatcaatcactaactaaggaaatgccttatagctgcattttatggaggcacttgctcaaagttatctcctctctgatgactctagcttttgccaagctgacataaggctagtcacctcaactgactgcttgttaatttgacacacacattggtattaagccacagtccttcctttctcgtctgtccccaggatctcacattaaaattgtattttttacaaattcaaatacattaacgttctggtcccttttaaatagacaatgtcttttttttttaatttgaagtctttcagctgtgggctcctataaaaatcaaaattaaattaaattaatttttcaagagggaagaaccaggagacagccacagtctgaacaaagcaaaaccaaactccaacagtgcgaataacactgtatccaattatctgggattcattcacaatcctttgggctcctccaaagggcttgaatcacttctccagctctgccctctgtagcacacacagcttgtcttctaggctctagctggctccactctcgcctgctgctgctgttcttggtggtgattccatggcactggcatctccaaaactgttggtgtctcttgctgcaactgggctgtactttcaccaatcgcctctcataggctctcatcgcggtactaagcttcaacttctatgcaagaccccttccatcctgggccttcaactgctactgatgctgcttctttaccagtggcctctcctcgcttctcacggggccaagcctcagctgctttccaagacccctcttcatgccttcaaacccagcaccacctaggtgactctaccaagtccagctgccagcttgaggtccagccttggccacctctggaacacagcttctgtgtgctaaccctaaggaaacacttcccaggagacttctggtctcttcttagtcgcccctcatttcttattcctagctaacctgcatcatttgtcccagtggtttcacttccatggtgttggtctcctgttaatcacagttgactcttcagccccagctaaccagaactacagaatcttaattaaaataacaaaaatccctgatagagtctttaatcttccctctgaaactacacaagccaagcctccatctcctgcactgctctcaacatttttatcgtcaaagcccctaaagaacaacccactgatctcttctagctcaaaattccaaagtctttcccaaacatggtcaggtctgtcacagcaatactccccaccccccacccccatatactgatattaacttgtcctctttagggtttgcattactaaaatgaaacaccatgactaaaaatcatgttggggagtgtggtggtttgaatatgcttggcacagggcatgtcactattaagaggagtagccttgtcaaagtgggtgtggtcttgtcagagtgggtgtggtcttgttagaggaattgtgtcactgtaggagtggactttgagagcttcctcctagctgcctgaggattccagactgcctttggatcaagttttagaactcttggcttcttctccagcaccatgtctgcctggacgctgccatgcttcctgccatgatgataatggactgaacctctgaacctttaagtcagccccaattaaatgtttcctttgtaagagctgccttggtcatggtgtctcttcacaccaatagaaaccctaaataagatagggagaaaagggtttatttggcttacacttctattatagcacagtacacagaatcataatttcaacaaatttaataagcatctacttgtgttaggtgctgggctggcagcaatgaagaaaataaacaagtatttctaattttaatcagttggtaatattaataagagataattacaagtaacataattttgtttattaattatttgttttaagacagtgtcacatagctgaggattaccctgaacttctgatcctcctgcctctacttcccaagtgctagaattacacgtgtgttcactaatcctggtttatggacactggggatcgaactcagggcctcatgtatgctagacaagcactctgccaactgagctacatccccagcccaataataccttattaaaaagacaccaggtatgaaccagatgggttggctcacacctaataatccctaaaccctggatactgaggcaggaaaatcttgagtccgaggccagccaaggctgcagggtaagaatatctcaagttgtgtcctcaaaagataagttttccagatacagaatacgtacagagctcctacagcttaaagccgtaacaaacattaccccacagcctgacctcaaaatgctgggtctgtggttcggtggcgaaggaggctcacctggcatcatgtgatcctaggttcaaagcctagcactacaaaaacacaaacgaaaaacaaacaaacaaaaccctaaacctaaaaacaggcaaagggcttagacaactcttcaaagaaggttcacaaacactcacaagcacagaaaaatatatccatttccactaatcatcagaggaaacaaacgaaaattatcctgagccaccatatcacaactattaggatggccgcggattaacaagtactcccggggatgatgggaaacagaacctgtgatactattattcagaccttgaaacattaccactgctatgggggacaaaatggcagttcctcaaaaaaaaaaaacaaaaaaaaaaccggaaacaaagttacctcatgtccaagtattccacttctagtaaggactccaagatctaaaagtgggatcttaaggaagtatgtgtatacctttgtgtgatggcttgaatatgcatggcccagggagtggtactattaggaggtgtggccttttgggaggaagtgtgtcactgtaggtgtgggctttgagactctcctcctagccacatggagccagtcttctcctctttgactttggaacaagatgtagaactcccagctcctccagcaccaagtctgcctggatactgtcgtgcttctaccttgatgatgatggactgaacctctgagaactgtaagccagccccaatgaaatgtcctttataaaagttgctttggtcatgttgtctcttcacagcaataaaaccctaactaagacactgtgcttacagcagcattgctcgcaactgtcaaaggtagaagcaacccagtccttaaagggatggaaacatgagctaagtttggtatatgcatatgatgcagtattattcagccacgaaaccgaaatagtgtgcctcatctgagtgaatcttgaggacaatatgccaagtgagctaagccagcccctaaaaggcaaatattgtatccacttaacatgaacagtcaacatttcagagacagagagtggatacaatgagatcttccagagggtgggggagaggttattgttttgtaggtgtagagtgtctgttcttcaagatggaaagaggcttggagaagggtggtaaccattgttgtaaatccacttatttcactgaactgtgtactgcaaagctgttaaagtggcgtcacctgcgttttactacagtttttcaagaccttgtaggatagatggaaatggggatagatacaagttagatatcattgcatatagataagtggcatacatatatcagctagacaaatcagatagagaggggaagcagttttacatggggtgacccacagagatgttttagctactgtctccctatacccaaatatctgacaagcagtaatccaaggaaggaagggtttgtttgggctcacagtttaagggcgtagtcatccacaccagtgaaggtacagaggcaagagcatcactagatgctcaggaccacagacaggaagcggagatgaaggctggcacttggctcacttcctcgttttctctttcttactcgctttgaaacccaagaccatgggatggtgccaccacatccagggcaggtccttcctcagttaaaccgctctagaaatgccctcactaacatatccagagaggtacctctcaggctactccaaattcggtcaaactgaagctgacccatcacgggatgcatgcttggaaaggagacatttgagcacaagcctagaggaaggaggatttgggggtgggatggtggcctgggctctgaaggagaagcctgtccaggatatcaatgggctggaacagagctaataaggaccaaataagatcaaaatacagcagggagaagcagagggaggacctgtcgggcagccctgcgctgagctgtgagtgtgtgggcgtctgtctgctccaagtgcaacacaaatcacaatgtctctgaactatagagtctttgatgaccaaataacaacacctgaccctacatatcacaaaggtttcatgaaggaagatcatgttagagaaattacatgaatataagatggagtaggcacagattacaataaaaatgacatgcaaaggcatataccacaatcccaggcatattctactatatcccattgtgtggtttgtggacctccttctgtactttcctaagaaaatactgctctggacctggtatcagccctgtctagcccatctccaccatccaagacatccctatgtccaacagagtttggagccagccatcccagagttaactctgataaaaaattaataatgtcaccagacccttcaccttcagagaggtgctaacttctaatacacatgagggactggacttacaatgtctgactcctcccaatgattgaataggacattcaatccatgaagacagctgagttaggccacctatcaaaaatttgaataggtgatgtaaatttttacacgtgccccttctgaagagacatctttaatatggaggtgaattcttaatgttctttcctcgtctcgactccgattccggcagaacactcacccttggcatctctcggtactttgataaatggcacaaaacagagggctcgccgcttttatggctgcatttcagcccttccccccgccccccaccattccatcacgagagccaaatgagctaccacacctgcagcactgatctcacagtgtccggcacgggtccagaggacagtccgtcctagtggcgagcaggctttcaagttcttgatgcaggcctcagatagttccacacagcagatgggaactgggagtttctaaaccctctgcctgccatctacttaattcagataataggcctgccagatggctacccggtcctaaagttttagctgggcaattctccatcccctcgggagacaataagcgtggacacacgggtgctccagagaccattggaaagagctgggaatgtggcaggggaagaggtcagaggatatccaaggataccagcagctaccagccatttgccagagacttcactgcaagggaatacactcacacttagagtcaagtgctgtccctgcaaaggagcaacctagagtcacccttacagtgggtatcctgctgtctcctagggttacctttacagcggtgtcccattgtctattatggtcactcttacagtgggtatccattggcccctagggttacccttacagtgggtgtcccattttctaccagagtcacccttacaacatgtgtcccagtggcccctagggatcacccttacagcaggtgtcccattgtctactagggtcacccttacagtaagtatcccattagcccccagggtcacccttatagcaggtgtcccattggcctctaggatcacccttacagtaaatatcccattagcccctagggtcacccttacagcaggtgtcccattggcctctaggatcacccttacagtgggtgtcccattggcccctagggccacccttacagtggttgtccagttggcctctaaggtcacccttatagtggggtgtcaccctttcagtgggtgtcccattggctcttagggattggcccatggaacttagctggaacagagatgctgcaggcaaagtgtctgaggtgatctcaggaaagcatcaatcacccttttacccaggagataaactttgagaaaggcttggactacagtgtttatatcaaggctacctctacacccgggggcaggacaccctgacagacagcccgtttacatcactacttgttctgtttactgttttagtgtccattctggaatgcccttcctatgcctccctctgcttacccatcttcctcacagatcaccccctccaggcagtcttcccagaccactcaagacctcacttgcctcccacttctccaaaagctccgaagaatcatcttccttgcactgatctatgcacgtgactctcacgcctcttgttcagtttgatggcaggcctggcaccacacctggctgcccttgcttatccaacctcatttcctaacccaccgtagaaccacagtgggtgcctgctgtctcgttagcataagttgggacatgcagtctttaaaaactaagttgggtagtacagtagaattggtggaaaaattaaaaataagcttcctcttgaatgaacgatgagaggtgagctttggggacatcattctgtgcctttaaaaaaaaaaaaagtataaaatgccccgcacttcggaggcagaggcaggcagatctttgagtttaaggccagtctggtctacagagtgagttccaggatggccagggctacagagaaaccctgtctcaaaagaacaaatcaaaacaaaagtacaaaagaaagggagaaatcagatgcaggttgcaagttcctggtgacatcagctttggcaggccctgatggaaagtgaccttgccagagccctgctcccccattcagttggaacactttccactaacggtattaatctggccttcagtctgaggcagagctgcctgggccaagccctcctgcttcagtccaagtgatgaatcagccccatctcctaatgccctcaagaattagaagaatcggcggaggaagagagaggcacagggcaccatgcacaccctcagatggacaatagaaatgacggaggccaagaccttcggtctctttccatctctgggaagcctttccattaaaaacattttcttcttctgttacatccatgttttttctttttggtttcctcttgtcagcctcagcccagaggaaacttctcactccccacctccaaccacgtactaaacaccgtttccttccaagggcttcttcgttatttttttcttcaacttacagctagattgcttggcatcaaccgagaaagcctagtaacactctggcgttccaaaagcagcccagaagatcagaagtatccgccgcatctacctcctggactcggcacgatcaaacgctacgctctctgagaagacattgggagtagtagaaatgttaagtttgttttttcttttttctttctttttttttttttttaattttaaaaaacctaaaaagacaccttaaaggaagcaaaagacagacacagccaagaagcaagcaaatctgatattctctgagctgaaaaacaagagccaagggaattctattcttagcagagacttagccagctccattctccaggggtggggtgggttgcaaagaaggctacagtgccctctgtctgggacctgtcagcatgtagcctgggggcttggattcattctctctctctctctctctctctctctctctctctctctctctctccctctctctctccctccctccctccctctctctctctctctccctccctccctgtctctctctccctctctctgttttttttctgttctctctcatatattcttctttttttctctcttccaaatggagtttatttgtttaacagtcctggaactcaatccacagaccaggctagccttgaactcacagagatccacttgcctgtctctgtattcctcatgctgggaccaaaggcgtatgctaccacacctggcttagctaaggtttttcattcatggttttttgttagtcattgtacaacctttgcaatgtctgattatctaaaaagaacatgagagcagggagctcagttgacttcaccacagttgtacagtttggaaatggcatcagtaaagatgctaactaacccaggttcccttttcttagcctgtgtctttatagttcgtctttccgtatcagatttatgttgtttcatgctcaaaggctttgacagccagatctgtctaacacagaggttggttctcaaagctgaacaccataggcctcctaaagatgtgttctactatgtttggatacatgtctcccaaagactggcatgctaaaggcttagtccccaggcagtgctatcactaggagatggtgggacctctaagaggcaaattcttctaaaagaaagctgggcttttgtggaattgcctttagccagcctggcacaaacaaagatcttctaaaaagaagacagcctcacctttctttggttatcacactatggaaacaatggtccccaaggaattggatcccttggagcctctcacaagatgaaggaacaggctgaagcatagtgccagccagaggaggtttcatatcatcctgttatcttatctaccaccttgtaagggagaaaggaccagaaacaatgagtctataatgggactgtgacagagaggatcacacctcagccaggggcagcttagttatgctgatcactgtaaatgtaattcttagggggtgttcgacaccccttttgctcccaggtaacaacatggcatttctatgcccactttaacccattttagctcccaaataaatggcacagagacctgttaattttattaatgggctgcaagccttagctgggcaggttctgagctgttctaaactgactaggccacatgggctgttacttgctatctggtcttaccctggtttactccagttcacatgtatcctcagggctgctctctcatcatgatctcatggagaattctccttctcattgagtcatgtcgggaaccctcctggtcccttcatatagtctctccatctcctcattctctctactctttcttccttggacctcctgactgggatccgaagtcccgccctattctcttctgcccagctaattggctaatcagctttttagtaacccctgatcagaggtgaagaaaaacaatttttatataacattgaaatcagagagccttaaccatgccattgtctggcttgcaaccagacatctaagcatctgaacacacagtgcacaacaccattccccagcagatcatttgctctcttaacactaaagctctcatccagagttggatgtcaccagatctctttatttgttcctcttcccagtggggccattgattacaagtcactctctgtatgccactgccctattgagggtgggtaccttctcctctctggttgcagcagccctggcccagctcttactaaccactctgctaacacaccttccagaggaaatgtggactgctggtctctcctcttcttcctagcaccttgactttagcccactgaggctacctttgagtatctggcttcaagatctctaggatggttttatttaagccaccaaccttgcagtgatatctttttctttttcttttttaaaaggcttatttattttatgtataagagtacactgttgctgtcttcagacacaccagaagagggcatcggatcccattacagatgattgtgagccaccatgtggttcctgggacttaaactcaggtcctctggaagaacagtcaatgctcgtaactgctgagccatctctccagccccttgtggtgatttcttagatcagcaataaggacacacacagatactgcacaacttgttcatctacagctcagtttcccagtgtctgaaatgagacacctatatccacttcaatagggtatgagtgaggactaactggaataactataaagttactgttgtggtttggagacatcaagtgctaataaatggagctgactctttggatcataaagaacattcttcttgaagctcaagattgcccacacagcagctgtgggtcaggacaagtggagcccagtgtggagcagtgtaagaaatgggtagaaagaaagggctttggctgtgccctggtttgtttttactgggcacatggtggggatcagtcaacggtacattggtgaaggcagtggtaagagggcagtgcagcaggcttccctggtcttgagatctttatgcctgcccgttctgaaggccccattttattcacagcaatttgatccactgtgcttcactgtaaagtgaaccatgagacacccaaaggggtgagaaataagagttccccttcacttcatttacaaactgaatacagccagcacattagcttctgagcctatggcacagtctctggttcttaagcaataccaagcataaaactgctttctctatatttcattgaatcgtgaatattacgaaacactttgggcaaataactgttctcagttccctcatctattaaacatgacagatgttccctcctacctatggggctgctatgagccttaaatgacgtctatgtaccaagtgtggtcaaatagtcagtacgttagacatgtgtcgcagaccctttgggtccctttgtctgcgtggacagggtctctagtcgcaggtgggcaaagagtcggtaggtgacaaatagaccaacaggtgagattgtgtagaatctgaatgtattctcacaaagtgaacatcagtcttatatagtacagcataataatcctcaatttcctttgtgtatgctggacagcttccttgcggagcttcaagagaaagtaatccacgtgcggtggtttgaatgggaatggcccctataggctatagcatctcatttgaatgcgtaggaagtggcactattagtggccttgttggaggaagcctgtcactagggggtgggctttggagtttcagatgctcaaaccaggcccagtgtctctctccctgctatgggcagactcagatatggaactctcagctctttctctagcaccaagtctgcctgcgtgctgccatgcttcctgccacgatgataatgaactaacctctgaactgtaagccatctccagtcaaatgctttcctttataagagttgtggtcatcatggtatcccttcacaaaaacaacaacaacaaaaccctaagacattgtagtaggagtcaaagagagtaacttagagccagcatgtactgagtacatattgtatacaccaggaacttttctgtgaaccgtaaatatcagggtaaacaagctgctttctgagctaaggtagaagagacttgacagactccatgtcttagggtttctagtgctctgaaagacaccatgactacggcaactcttacaaagaaaaacatttcattggtgctggcttatagttccattatcatcacagcaggaagtatggtggtgcacaggcagacatggtgctggagaggtggctgagagctctgcctacagatttgtaggtggaaggtcttcttgtgacagtgagccactgagcctgggcttgagcttttgagacctcaaagcccatctcctagttaacacactttctccagtaaagccacacacaactgcaacaaggctacactcactgcaacaaggccacacctactgcaacaagggtacacccactgcaacaaagccacatctactgcaacaaggccacatctactgcaacaaggctacacccactgcaacaaggccacacccaccacaacaaggccacatcccctaatagtgccactctgtacgggccaagcattcaaacatggtgaatggaaactgttcctactcaaaccaccacattccatacaatggatttagagaacacaatgagtggtatctgtgggaaaggctgtgcctgatctggggtgggggaggggtattggggagctcatctcagaggaaatgacatcagctggttaaacagtttcccagatgaagcgacaggggtgtgaagaggttgggaggggagtggccctctgaaggcatgagatgaaatataagcatcatttttaaagagctatggcatcaaagagagtatgatgacaggggtcagatctagaaggtggccccgggtctagaaggtggagctgggtctaaaaggtatagccaagtcttgagggtggaaccaggtctagaaggtggagctggatctaaaaggtggggccaggtctaaaaggtatagccaagtctagagggtggaaccaggtctaggaggtggggccaggactagaaatgaaactatgaaagatttagctgctgaatcaaatgtcattcctttaacagattgacttaactctgagttgtcaattgtagctgcatctgactgtagcttaatgacaacaagagctgctacaggctttaaatggagcagttttataatgtttgaactacagaagcagtcactctctggaactggttgaagaggaacaaggtgaaattcaaaatggtttgggaaatcgttataataattttggtgataaacagtggcagggagagccatggtggtggtaagcaggaatcatcaggtataggtctgttgggatgatggccctgcagaagccatggttggggaggagggcggttctaggttgggtgaatgacagtagcatccattaaattgagaaatacaggaattgcccatttgaaagacaggtgatgggctcaacttcacatatgttgatgtgaatacagtaatggcctaagggatatctgtgtggttagatgcagttggcagttagacaggactctggagttttagatgcaggtttgagttttaagagtcatctgtccttggtgggtctacctaaaatcatgggagaggatgagactgcgcaaggcaaggggagagaggaagatgagcaagagcccaaatgcagaagaaattgaacagcctagaaaggaaacagaatatcacccaacaatagaagagccaaggaagtatggggtgccagaagcttaggatgtgagtatctcagaggagcaggggagccatgctgttcaacacatcaatgacatcaaaggagacatgattggacttgacacaactcaggccaagtgcacgtccagtaagggcatcttcagagaagggatggagtggcattagcttgagataactcacttaaaggaggaaaacttcattctggatcatgggtttaagaggttttagtccaggatcagatggcctgattgtaaagagacagacaccagacagggataacacagctgaggaaaatggctaccctgagggactgagatcacagggtgacataggtgagccagagacaggatgcatccctgagggcatcctctcaaggggccactcctttcaattaggcacccccacttccatttccatggcctcccaagagcacatcgcactataaacccatcaacgcataatccatgaatggtatcagggtgtcacagtctgatcagttccctaaaccctgccactggatttactccaccgagggatgtttcagtcagacccaaagtgtaacaggggaatgataccgattgcaactgttacctcaacgagatctagaatcatcaggaaaatgggtctctgggtatcccaggagggcttgtctttaactgcccactgtggatgctaccattgctcgggatgggatctagactgagcagaaaaggagaccatgaactaagcacatgtaagtaccactctgtgtcttgacacttgaatgcagctgcctccagctcccgcccctgtgacttctccaccaagatggactgactgtaccatagaactgtgggctgaaataaacctataagctgctttcctcagagtgttttgccacagaaacaagaaaagtaacaaagacgaagggtttagagcccaatgggcaggagtgccgagtagaagatgacacagaaagcacaatgggattggtccttcaaggaaaggattgttttcttgggagaaccttgcagagggtagagaggtaagatggaagttggcagaacaacgtttgggttacttattttagtatggaaagactcagaaatgttaagttccttataaggaaaagccagagggaagaagggctggaagttcaggttgttgtgactattcagagtctatatccccaaatttctctcttcattaaaacttaaccatgcttccagatcaacatctactgtcatttctaatgcatgcatgttcagaaaggtgttaaaatttaaaaatgtttagcctttatttttattttattgtatggatgtttgtctgcatgtatgcctgtgtaccgtgtgtatgcagtacccacagaaaccagaagagggtgttggatccccttggaactatagtaacagacacttgagagctgtgttgatgctggaagagaaccgggtcatttggaagaacagccagtgctttcaatggctgagcccccaaaagtgaaaattttgagtcagtaagtgcatatatctccagcaaggggaccctgcctggcacgaaaccattctaaaaaagccattagggcaatggatgggaggctctgtaccctcatgggtgccataacgacacatgcttgcctctgcaatcttttccgggatttccccatgtgttttactgacagctttccaattatacgtccaggtcgcttttcctacctctctgatattttgaccttttaactgtcaactatactcatcaggcatagtggtccacttctaccttcccagaacttgaggactgaagaaagtattcaagagaagctttggtttcatgcaagtttgaggccagctcaggctacatgagatccagtctcaaaaaacaaaaacaaaaacaaaatcaaaaaacaaacaaaaacccccagccatttatttatttatttttaaactgctgcctacaatttggtaacttgggccctccacatcaagccctccagtcattttccttcctactgcataagccgactcagaagaaagagccactttccttaagataatagtcagctcttgtggcttccaaaactgaaattcgcaaagatgtgggcatgtcaatgtaaaagggtctgccgtaacacggcatgagagagaatggccacaaggctggtaggagggacaccaggaagggtgaggaaatcaaagtactgaatttacttctgggactcctatgtggcaagagagcttccgtgttataatgtatcacttggtttccatgaagaaatgtattcacagaagggtaaccatatatcatgggagccttttttttttccatcttttaagttaaaatgctgcttacagcttacgggaagtcatcataatttactaggcagagatttccctatcatcaccatacataaaataatggcatatctattattaatgatgtcttaaatccagcaaaatatggtatttaaaattttgatcctagagttttctaagattgatactgcaaataaatattctcacttgatgcaaaaactattattatgcatcatgtgttttatggatcaatgtcaccaaatcagagttgccctggtaagtctcagagttccatgctaacgaaagagcatgtctttccctccgaaccaccacggctctccccctgggcaattgtaaaagtgggtccgtaaacacccatgttacccacacagccaagaagcagggctgacagcatccttcccacctaagcgcagtcttatcatcatcacccgtggagtgattctcaccttgctttaattacaatgaagaggaacatatttttttcctcttcagaagcaagtgggtaacaactacctggataaatggggtacttgtgttcataatgcgtcagctgtagatgttttgccctcctggatctgcagttttcattcttttcttttgcctcacactgtagcacctcactgctctcaactagctagagctaggagtgaggccggtgaaagggacatcaaactccatcagaagacggcgtcagaaaccctggggctggagttacgggtggttgtgagccacccactgtgtgtgctgggaactgatcacaggccttttaagtgagctgcaaatactcttaaatgctgggccttctctccagctcagccccttgtgattattctaagccacatctatccctgcttttaattatttttatgtcctaaagagtaacggcagcccagatatactcaatacaactattctgaaaatagttgcaaattgagaacaagaacttagacataaacatttgaggggaacatttgcttgacccttgttggcccctagatgttgccgtttgtctggccaatgggactgaaaaagaggtactttctgagacaataggaaagtgtccttatgaaggggcggagctatgaggggtggagctataaggggcggggctatgaagggcagagcaggccttcctgtcttttcattgtctggagctaactcagaaccgctaggatttccacaataataattgagccaagaaaacaaggatccctggtgaaaagcctggtgaaagtgaagtctctgatggcgatgaagctgccacaccaatccaccaatccaccaatccaccaatccaccaatccaccaatcccaagcagctccctttccagacctccttttttagcgtagaaataagagtcttgagtgttcaaaacatcatctggggcatgtctaaatgtcagccaaatacagttcctcactgatgtgtcataaaaagatctgttcggggttaggcagcaggataggaatgcatgcctggagccagcccagaatctgtctttttatccttcgctgtgctacttttacactaagctcgctctatgggtttaggaggctgcttaagcattatttattcacaattcttcattgaaaataataagattcacttctacggattcatgataactacctgacataaaaggaaaaacagccgtatgaaatggccggccctttcttcttccttacgtctagcagtgagacaatccttccaatatcccattcttgactttattccggtgtcctggacaggagtgtggatgttaaaaattaaaccataagccacagtttaatggaatgatagctgttcagctggagaacagaaggtgggaaggagtcttccactgacacagcgctcgccaagaaaggccagctgtttcccgtgtcctccaagaatggaggacatgattaaaagaatttcctccctggcttctgtcatagagctggcttcctgggaatagaatctgggggtgggggagagggtgagggaggggtgggtaatctcaagggagaaaggtagaactttgtaagcaagcagaggaagtgtgggtttagctgttcccataggtcccagaaaatggaccagggggatccctagcaggagaagttaccaaaagacacttaagtagaagcacagtgtcacccatctgcctggggtcaaatggatgtgttcaatgtgaacagagatgtggggagacatctttattgtggatgtgaggcctctgtggctctgcatggtagaactgagagcaaaggaagccatccttttgcagcctgagaggatgtactgggagagcatatgcacacacaaaggagtggtcagattcttttctggggcctcattctttttcctcccatgacaactgacccctgagaagagggtttggtgccaggtgtgatgaccaacatctgcaattccacactcttgaggctgaggcagatggatggcaacgagtaggcaagaccagccaaggtgatagcaagtcccaggttaacctgagctaccatgtgagaccctctcaccaaaacaaaggctgcaagtttacagtcaaccctgtttgctctgcccttgacctgattggttaaccctgagcttcgctctctccaaccacaaacagcacttgcagctgaacacacccctccatagggtagacatgctctttggccctttactttcaccaatgggaaatgagcagaagtgaatatctctgatgtaagaaattaacaggcccggcacctcccctaatatatgttccccagcctaccgctgaaaagaggggactcagaaggccccacaggatggaggagccatagttcccagcccaggatgatgtgggatgaggaggtactagaactgtcagtatgctggctcatgtacttgcaggtggtagcctgtttgttataagactgagagaacccctctcatgaatgctgaacattttattatctatcatctcccttggcaggggtcaaaacacgaatgtccagtctctaaagctgatttgcaaattcagctataagatatttccctacccctggccacaagtccaattgctagaatttctggggtcactgttgccaggcccaacagataacagtgcttaagtatgtctcttatgggtatctgcagagaaaacggaagggtttcctaggaataataaattcagaaatgattgaggacgaccctggacttaaatatgttacccactgactctctgatcacaaactcatcaagacgtagaccttcctatcctcatcttacaagtgagtaaacagtgattctagaaggttgttgccagctcagcaaggaggctcaacagacaagaggcagccaccaccaagcttggcagccagggactgatgtggtacgagagaattaactgcacaagttgtcctgtgactgccacagagatgccatgtgggagaggagggagaaggaggaaaggtgaggggaaggggggaggaaggagaggggggaagaggaaggaggggagggggaagaggaaggaggggagggggaaaaaggaaggagaggaggaggaagaggaaggagggagggggttattgctaagtcctcagttgaagagttagtgggtagaatagggaatttgagtttgtgcctgcacagccccaaagcctgtgccccatcccccaccccaccccactcccccacccccatcccctgcaaggaaacaggcaggcctgtcccttcttgccttgtctaggggcaatgcatcctgcagagctggttcatggtttgagcactgatggattgagagacactgctttcctgggtgttctgtgtttcctggtggtacctcatttcccagatgtcccggctttccgggaggcgatgctttcccacgtgtgtggcagttcctggatgtacctcagtcccagaggtaatgattttcccagacatcatcatttttttcccagacattggatatgtcgcttttcctggatgtactgtattctgttgttacgaggagcagagaactcactctgcttctttctgaagcccttgttctgtggctcccagatgcatgattaggcagggtccaaattacagcgttattacagggctccacacacatccctaagtggagaggtgtttccagaggcgctagcggtacacaaactaagctttgtttgggctaggagggagtcctatttttctcttcttttttaactccttgcttctagaatctgtcacccagtgttctgaatcatgagtacatctgtgccacagaaagtcaagcaaagagccctggctcttcctccaggaccctggggtcttaagcagttccttttctggcgtcttaagcgggcatggatgcctgacaaggcaaagattctgtggctatttgactcacagaatggtccatctgctcttctgtccgctgtatgtgatttattttattttatttttttacttgaggtcttaaactgtctagctgcccaggaagggtggatatgatggtttgtgatatgcttgacccagggaattgcactattaggaggtctggccttgttggagtaggcgtgtcactgtgggtatgggctttaagaccctcatcctagctgcctgggagtcaatcttcaactagcagccttcagatgaagatgtacaactctcagctcctcctgtaccatgcctgcatggatgctgccatgctcctgtcttgatgacaatggactgaaccactgaacctgttagccagccccaattaaatgccgtccttctgagagttgccttggtcatggtgtctgtttatagcagtaaaaccctaaccaaaacagtagaatattccaaaaggagccagagaagtgctgacatttaagctgctaccttgttaggtgagtgttgttttcctcatagactgttgccagggagtcgaggagggccagagtccatgggagccaaccagagctgtagacaaatatcccaggccgggtaagaaacagggtgatctcaaaattgggtcacttccccagactcctttaaaataactctctatataatctatgcataatttttatgagagaagatgttttcaaggctctctgacacgcttttgatgcacctagctcaagatgccactacctcccacctggattgaccttacctcttttattcagttcttgaccttgtcacccttctgatagctgccatcttcagtgtttcaggatgctgtcctgtcagaattctgctgttggtcaaggcgacccaaaatgtcagcgtcctctggacacaaatcctggtctttgtggacaaacacactttctcaggatgtctctgtagacacgccatgtctgggtctctctgtccacttgcatgcttgttttgcccccctgtttaagggacatctctgttcatcttgtagtcccctacagcagtggttctaaacctatgggtcaggattcctgtgtgtgtgtgtggcggggggggggggggtgtgcgggggcggggggggggtgtcaaatgattctttcataggagttgtctaagaccattggaaaatagcagatatttgcattacaatctgcaaccccagcaaacttacgcttttctgtggtatcagttatcagtggctaacacaaatctaaatgtcttaaatggaaaattccagaagtaaataattcacacattttaaattgcattctactttgagtggggccctgaaatctcactctgccctggctgggctgggcagagtcaactgtttgtcacgtgtatctgccctgtgccgtctatcactgaagagtacacaacactatcaggtcaactggcaacagaatcagagctgctgttcaaacagccttcgttttacttgataaatagcattaaagttataaaatttttgacggtcctagaatgggggtgtgtcaaagagaagccacaaagtgcttcctttaagtaaaagggtgatacctataacagagttgtgtgtgtgtgtgtgtgtgtgtgtgtgtgtgtgtgtgtgtgtgtgtttgtctgtgtgtaagagtaaataccatatgcaccatgtttaccactatctatggtttcatggatgccccgggagtcttgaaacatctcctgtagataaaaaggggaaataccttggtcacttttcctgttgcagtgataaaatgttctgacaagaaaaatgaaaggaagaaaggttttgtttgggcttgtaatttcagagtacagtcagtccgtcatagcgagtctgtcatagtggcagaagtgtgaagtagctgatcgtgttgaatctgcagtcaggatgaagagagcaatgagtgccaatgttcacctcgcttccgtgctcccctcacttccggtaatgagtgttagtgctcccctcacttccagctatgagtcccagtgctctgatggcttccgtgctcccctcacttccggtaatgagtgttagtgctctcctcacttccgccttactacggggtacaggacctgagcccaggaaagggtgtcgtcctccttcagagtgaatcttctgaccggaatcaacccaatctggataatctctcacaggtatgcttagaggcctgtctgctgggcgatatcaggttttgtccagtgacaatcaacactattgaaggaagactgtcgcataaatgtggcaatgaactgcctttggacaagactggtgagcctccactgacttaggcttccctcagagagattcaagcatcttggagaacttagaagggcactgggtttaatgcagtgctatttgaaatatgtgtatctttgtgtaggtttgtgcacaggggtgcagtgcccataaaggccagaagaaggcatcagaacctttagagcttgaattataggtagttgtaagctccctaatcttggtgctgggccccaaactcagtcctctgcaaaaatgtacatgtttttaacagccaacccatctctccagcccctgccttgaaattcttaaccatcccctagtaaggcccacattttcatttattctgagccaaaccagttatgtagctggacttgcttatgcaaacggagaggttgtacttattttttgtgtcttaatagatgtcttttcctattagatagctatgctatagatgagtgagttttagtcacacagttatgtgtgggtgacacatgctggctggtgacacatcttcatttcagcctttatgttttgaacttccatggttggaggtgttcctatcttacgtcatctaagatactcacgagtttccttcaaaatctgcctatgggaaaaaataaactagtaatcatctaggtgacctctgactacctcagtctttgtcacctcagttccatttgtcctttatatgcttgtggtaatagctgacccccttcctctctatacacacactcatacaaaccctttcctgagatttctttgaaataaacaatgttatagcctgtggtactaaaaaaaaaaatcaactacaaattcgggatgggaggtagtgaagtaattgtaagcaagaaatctttaaaaagagcttcaaggtgtttggttgctctgggggagatgagtgagcgatggttggttatcaaatgtatgtaacattcaatttaactttttaactgagacagaagtttctccaaagtggatatacaatatataagtgataagtataaacctatcaaagattttaacttcactaaaagatgacagagattcaaatcaaaacttcagcgagatgctggggtagtgacacatgggtttcagctcacaggaagcgaaggcaagaggattacaggtttaatccaatcgaggctaataggtgattctcaggccagtgagcttaggcagctcgtcacaaaacaacaaccacggtgaggtcttggtttgcactaactacaatcagtccaccatcaatgagagagacacagacagacacagacagagcagaaaataagtattgcaaagctctagagaaagtggatggcttgtgtaccatacagagggatgtaaaatgatatggccactatgaaaaacagcatgaagatttcttcaaactacaacatagaattaacatttgacccagtggttccaattctgaaaatgtacacaacaaattgaaagaagaagaaaaaaaaaacacgaggaaattgcactcacaggaacattattcacaataagattaaagcacccaatggcccaacagtgaatggatggatgggtggattaaataacctgtgccatatacgtaccacaggggcttgataacgatgccattccaagaaaaatagggcattattttggtacaccaagcacttcacaataagggcaagactgaagttcgtctggcctgccaaatgtggaggggaattctgtagaatagtcttataggcataacggtcagacttcaagcccccattatccatctcagtagagaagactgtggtggtcactattctatggctgggcagagacaccagcaccaaggcaattcttattaaagaaaagcatttaattgtgggcttgtgtatagttttagaggtttagtgtgttgtcatggagagaagcatggtggcacacaggcggacatggtgctggagaagtaactgagagtcctgcatcctaatccatagggggagagagagagagagagagagagagagagagagagagagagagagactgactgactctctgggcttggcatgggcttttaaagcctcaaagcccacccccagtgacacacttcctccaacaaggccacacctcctaattcttttaaccattccaaatagtgccagtccctggtaactaagcattcaaatatgtgagcctatgggaaacattctcagtcaaactaccacaaagactgaggactgtgaccacacctcagcatccaagttgacacctgtcttttaggctctaatgccaaagagaatctttacacccaaatctctgccccatcaacctttacggccctccacttttcctattctccccatctgcaagcaaagggatatggacacttctaaatatgctagactggggacaatcatactagactggagacccatcatactagactggggaccatcatactaggctggggaccattatactaggctggggactgtcatactagtctaggactgtcatactatctgaggactgtcatactaggctagggaccatcatactagactggagaccatcatactaggctagggaccatcatactagtttggaactgtcatactagactggggaccatcatactaggctggggaccatcacatactaggctggggactgtcatactagtctgggactgtcatactctctggggactgtcatactaggctagggaccatcatactagactggagaccatcatactaggctagggaccatcatactggtctggaactgtcatactaggctggggaccatcatactaggttgaggaccatgtcatactagtctgggactgtcatactctctggggactgtcatactaggctgaggactgtcatactaggctagggaccatcatactagactggaactgtcatactagactggggaccatcatactaggctggggaccgtcacatactaggctggggactgtcatactagtctgggactgtcatactaggctggggaccgtcatactagattggggaccatcatactagtctggaactgtcatactagactggggaccatcatactaggctggggaccatcacatactaggctggggactgtcatactaggctagggaccgtcatactagactggagaccatcatactaggctagggaccatcatactagtctggaactgtcatactaggctggggaccatcatactaggttggggaccatgtcatactagtctgggactgtcatactctctggggactgtcatactaggctggggactgtcatactaggctagggaccatcatactagactggagaccatcatactgggctagggaccatcatactaggctggggaccatcatactagattggggaccatcatactaggctagggaaaatcatataggctggggaccgtcatactagattggggaccatcatactaggctggggaccatcatactaggctggggaccatcatgctaggctggggactgtcatactagactggggaccatcatactaggctggggaccatcatactagtctggggaccatcatactagactggggaccatcatactaggctggggactgtcatactagggcgggactgtcatactaggctgggaaccgtcgtactatccttatccttctatgttctcctgccctttcagtgatttctcccctcccccatctgtgcattaattattttgtgggtgttttctcctctttaatcttggtagtttattccaaagtagggtagaggagatgtttcattttaccttttaaaaaacagaagagaagtttgactcttgttatcatgccaatgaacctggaagacattctgctaggtggaagcatcctgtcacagaagaatacatgtgatcccatttgggtgaggtgccccttgcctccacctaactccagagcctttttgtcctctacaaatagtagctcctcctgcctccctcccttcaacctcggcacctaccatttaacactatgtctcaatgcagttgggcatccgatgggtaaacgggatgatggtccttggtgtctctctggcatcgcctagcatagcatctgcagatacgttcatgtcacagcacagaaaaggacaggtgtcagcacaagacaccctcaacaccaagttctcaccacagccatcactccaacccgggttttcttctcttattcagttcacttaacacatatttatggagtaccttcgacatgatctaccatctttggactgccccgtgctattgaagagaggaagacaggaagtcccagtgcccaagattacacacagacggagactaaacgggcagttaagtgaggtcgcttcaggttgccctgagtcctcggaagtagctacagcagggagcaggggatctactcactgcccagcagtctcaggggagggaaaagtgcgcccacggtgataactgaggccttagcagggatgagcaggccaccaaggaggccgcgggaagagcatatgggtgaggaaaggtccagttagggcttggttaaagaaggggaacgagactgccgccatcgtgaaatgagcagagagcaggcggccaaggccggcagggcagaccacgaaggcaacaggaaagacgctgcccgctataggagcgcacaggaggagcagtggtctgaaccccttattcagagctctgcctgcagttgcaggtagaggtgatgacctgagcctctgccttcttctgccttcattgttctgagaatgacacaggcagggccacagagagcccacctgcctgctctgggactacagataacatggatggtggaggcaaacttctctgtcttagtgaggctaacaagcatactggacttgtcttaatcttttttttttttctttctaactatccaggacccagtcctgattgctgagtagatatttccttggaactgaagcatatgcccacctccaccccaactcgaacagaggcttgttaaggaaataaacaaaacttctgagtttcaagaagctatggaaattcacaagaggggccctcccttcccaacaccatataaggagtgacactttttttaaaaaagatttatttatttattatatgtaagtacactgtagctgtcttcagacactccataagagggagtcagatctcattacggatggttgtgagccaccatgtggttgctgggatttgaactcaggaccttcaaaagaacagtcagtgctcttaagcgctaagccatctttccaacccgagcagtgacacttactggaggtaggaggccgggggaggggagatgggactggagcccagccaacctgggtcacacacaccggagagttgtgcagaaagctctggggattatgtggttagcagtttggggataagctttttcagcagtgccacaagcctttgtgtcaccaagtagccctaataaattcactggctcaccacagtagaattgttcctttggtctgccgtggatgtcctatctgggtcaatagacatttcttcatgtctccccagaacacactaattcttaatttcacctgttcttaaaggcccagacccagaatcatccctttgtaacacctctcagccagcagccttcctccttggtctctaaggtccttcctgcatccttggtacctgcatcctgatacctgctcggcaagcactgagaaacagctgcagcacccagatgggcatcttgtttttagagcgtgttaagcctcacaggcaatgagtgatgtgaattcaacatgcaaaatggctggtgctcagcccaggagtgtggtgcaaagctggaaacagagtctagccacactctgcctctggcttcacctagagaagggctatgcggagagcaaaaactcgcaacttcctttgttaagtttgcaacccaagagggaggggaggcagaaaagagtcctggctgaggttcaggtaaggcttgttgtcatccccacccccaccccattctgcctctcctctctggctgtcatctcaggcatagctcactcttatccctacaaatatctcttcagttatctcctttcccacaagttacttcacccaaaccagcaagccagcccgctttcccaagccaggtccctggcatccagaatgtgcctaataaaaacacatgttgtaaaactaaatgaatgaatgaatgactttttttcatgcaaagaagaacgagcaaatcaaatgggggaggggccggaggctcccagattttaaaagaatgtattgcattgatagattagattttctctctctctctctctctctctctctctctctctctctctctctctctctctctctctgtgtgtgtgtgtgtgtgtgtgtgtgtgtgtgtgtgtatgaagcccggcaggactctccattccgaacaagctttctttaactggtttctcagtggggtaacctctcatttcccaggagcaccaagaaaggcaaatcaatattcacttaagatagcaatgtgccctagaaccacaggggccaaaggggtagaacatctcaagaccgcgtccaaggtcaaacataagtgtgtccggaattatctcagtgtaatgagccagctggcccctggtgcttcacaagacggctgggtaaagattcgggctggcctcaggccttggcccagcagggagctgagacgggggaagggcgccctctgccgagggtgaagaaaaatacaacctggcagttggtgagccctatgcctagatttcacttctagagggccatttaaaacaaaaaacaaaaaaaacctcaaccagagatcaagccaaggagctgttcctcacaagccctctcttagccccttcccttcagcccggtggctaattgcagtccttgatcccaaggagacagtgtccccccactcctgaggccttcgtttctaagaaaaagacggccgattattactttttttgttccctattaccttcctcatcttgggctctagagctccggagctaggggtcttggtcctgagaaagatctcagacacttttgagtaggagggaactcagacacaccctaaagccacacacacacacacacacacacacacacacacacacacacacacacacgtcagttgcctgtctataaaactgcgaggctgtattcgacagtcgggaggttccaactctcgtggtgcctgcctggtgtcctattttagacccagaatgcgtccgtccgcagagagagaacagcggctaatgagggatcgtgaaccaacagaaacaatggctggggaccacctaagcactttcctcccccagggaaggtagaaatggctttctaaggacctgcgtctctttattgaatcttgagtgacacctagtggtccacccgcctcaccgttgccgaggcttctgctcagaggagctttaagtaaactggagctcatctttgccttcaaagacctggggaatcaaagacagcctcgctgaaggtttctagcacttccccgcaagcattgtcctacgtgattccgaaagaaacgctcttatctggagagcttgctcaactggcacatcgttctagcagcgaatgtgttaagctagacgctctcctaggtactgggaacacagatgtcccagtctaggctcctgctctctagaaacagcctaggttggtgcagaaaatggacccgggtttgggggagtgttttatttaaaaaacaccatagtccactggaaaaatggagtgtgtgtgtgtgatttgtggatggaggagagcagtcaccacttgagctgggtcctggaggtcaagtagcgtgacagaataaaagtggattgacagcccacaatgtacacatccttccactccgttgttcaaacaatgaacttgagggctgctgggaagagaatctgtgggtgtggttaagatccccgggtctgccaatcttaaaaatctaaagcttgtccaaggcaggcctcgcccaatcagctgaacactttaaagggactggaatgttcctggcagaagagattggagactcaaaaggactcttgtggagttttctctgattggttgttcattaggaatttggctagccgggagagagctgagagccaaactgtgagaaagtgagttctgacagtggccagggcgctgggagagaagccaaagcttgctttgcgaaaaaccaagtcccagctgacgcctgagtttagctttgcaacaccacagagagaggactcaggctgtctgtgctggtctataaaactatgattaaccaattggaggggatttaagctgatagctatgcaatgtgttcagaagccacagaaaaatggagggggttggccacttggagaacaaaagccatctggccagcaggaccatgcaggcagacgacaaaggaaaacgtagcattgagaacaggctttggatgggaggcacagtgtccttggacagactgatggctccctgtacccctgtgttcacagcgtaaaatggagtcgtcagtggtttaaacctagagttagtggtgtgcctgcatagacagggctcgatacagctcaggaactatcaagtggtcagaagatgttaggcaactctagttgtagctcttaatccacagacaaagcactgggctgagaggccttggtcatgggttggttttttgttttgttttgttttgttttgtttactgggatagggggcatctaagactatatatccctgaccctacctttgttcttactaaatcagactctataagtaaggcccaaggacctgaactcacaaagagcttccagaacgagagggtgtaactgcaccattgcagtagttatacatcagtaagcagctggtagaatacagaaaaggcagtaagggcagggtgtgcacatgacaggctttgagggagcaccgcaccgtctaaaggggtgaacaggtcaccagagaatgtgctgggatcattctgagaggtgggtggggatggggataatgagtggtgttgttgggttgtgagagtccaggaatcttgtgggcgtgcagctggaacaccatataggcagaaacactcgaattcaggaaccatactgggaccggaattacaatgtgcgtgagcacatgatgtcataggtgtggagaacagaactgaaaacatgtgggcggaggtgtgggcctctctggaactgagaacaagccatcaggaagacaggaaaggtgctgagtgggacatgggccaagggagacactggtcaccagtgtccctggccttggaagattccaaagggacaaagtctgggagctgctccatcaatggcaaggtctgcagcactcacagactatggcttgggaatggacaggaagcaagagatgggttgtgctctttggcttcagaagcgaaaagggaaaacagggtagaagctagaaatgggtacaccctcaccctgcaccaattccgttgatgtgaacctagacacaccatccataaacacggctgtggcaggccgccaagaacctgctaaccttgaactgcatagggcaagaagcataaggctctaaggaaagaatggttacctggttgccaggccaagtgtgcagttatgctccaaagtgtgccacagagttcaggaggtaaaaaacgacaactgggcaggggaccttctctctggggacatgagtgctggctggccaaaggacactgagttgcagaagtcctagctagggtgaaagagcacaaattctgtgaggaccaactgtatgctctggggaaagctactttagcactctctactccaagagctcatccattcagtggaaacaatagccagacttccccagggccactccctgggagagccccctcagtggtggttcacagtgagggctaacacatggcagcgggcctgaagagtgtttgtattttataagtcagacaacggcagatcggccagaaccccctagaaatctcacacaaaacaagctgaaggccttgactatgatccacgaggccacctgccactgtcttctcttagtccctctccctgggtcctcacccctccagcatggttgtcctcatgatggatgggtgtggatcatcagacacatggagctttacccccgagaccatgtccaggcagctaccaccgagctttcttctctgtagatgtatgtaaggtgaatgtatgagaactttctggaactttggaatggacaccattgccccacacatctgttcagctgatgcctagacacagagagcagaacttaatttctaaagtgaaattcagtagctaaggcaagcacggcccctctgctcaaagaggaaaggattcagagctgaaatgctggaaccacaccgcctagttccaaaccctggcttggacaccactcacgtaaggtctctgtgttgttcctctcctcatgcaagacaggaataatagtgatacctacctatctcataagggttatgaagatgtatatgtgaatgcacacacatatacacacacatacacaccacacacacacacacaccacatgccacgctgcacaccataccacatacaaacatatacaccacacacacatacacacaccacacacacacatatatatacacaccacaccacacacatatacacatacatatacacatacatacacacactacaccatacacacactataccatatacacacacagacaccacatgccatactgaacatcagacacacactataccatacacacacacagacaccacatgccacactgaacatcacacacacacatatatacatacacacacacacatagacaaagggagaaagggaggaagagaaggagagggagaaagagagacagtgctgggtatatgacaaaaaaaccaacaaacaaaaccagcctaagggccaacaacatattctgcgtgggaatgcaccagtctagccgcccttttcataggcactggtggagaacatggcatcaagtgccgaatacatggtcactcgccatccgcagcagcagcctgtgtccgtgcctgtgtttatccccgacctgaagcaccatggagtgatacaaaaacatgggcttttataagaggaaatcctgagtgtgggcagcccctgttcttcatactaggcagtgacccctatccgttctcttctaaggatgtttgctaataactgtctctgaagagctaatacataatcctgcccacacggtgttcatgaacaccggagcttcacagacaatcagttcctgagagtgtagggtggaaccggcattactattgcaacaggcagggtcctctgaagaaacagaactgagcgtgtgtgtgtgtgtgtgtgtgtgtgtgtgtgtgtgtgtgtgtgtgtgtgtgtaaaatgtggactggtagtccaacaagtctgtctcacactggagaggccaagtaccttgtagttatgtctttgaagctgggtacctcaataaccctagtccggtgctcctctagaggactggaggagtcctggagagccttaggtctaagttagaatgccagtgacattagttttaatagcaggagttttaatagttggacagcaacaggatagatgaacttgtcagccagcctgagggcaagcaggcacgaacccttttcctttttccacatcctttggtctgggctgtcaccagaaggctgggtcttcctccttctgataatcaagaaaattcctcaccagagtgcccaacatcttgggttttagctgattccagaagctgtcaacttgacagctgaggttggccctcagaactgccgtaggaaaagtgaaccctcgaagcatagctttatgtctttggacgactctggaattgctagaagttggagtaaaaccagaaccaagagacaacaagttacccagacttctggcaagtcagagagtttgagtccaggttgagtgactagactactaagtgtgcctcacaaatggcttcctcgaggaactgctgtcagcagttgagtgtgatattgggcgaatgagtgttcaattgcatgagggataatctatcactctctatcgagaaatccaggcactcgatcttttttgacaggcagcacgtatattctattgccaggaaggaaggcagttgtcaaattcctaatttttccctttgaaaaattaacatttagctcaaatgtgagagctgggggaacacacaagaccttaattacaaagtgcaattcaagatctgtactaattaataagctgatgaaaaattcattgaaattcagagaaagaatcaagggacggggaaaaggagccggccagggttaacatggcgttctataaaatgtttaagtctatcgaaataagcagccacccctctgtcgtaattacaatttaatcacttgtgtgattgtttcatctgtaaaacttggtttgcacgtcaaaagatgtacagagaatatttctttaaattttgtagtttctcacagcaatattacaccagattaaaagctttaaagaccagcttagatacataaaatattgtttgtttgtttgtttgtttgtttgggacagtgtctagctagcctgggtaccctgaaacccactatagccctaggtagcccaaaattcaccttgaacttgtaaaaattctcctgcctctgcctcccagggggtgacaggtgtgtctaggttctaggctcagctatatctttaaatgtaagggaacccactggaaccctgatgttgctgttcactagctgtgacctccaactatccagatagtcccttagggcagcagttctcaacctgtgggttgcaacccctatggcaaacctctgtcttcaaaattatttacattatgattctcgacagaagcaaaattgcagttatgaagtagcaatgaaaacagttttatggtcgggggtcagcacaacatgaggaactgtattaaagggtcacaggtttagcaaagttgagatccactgcctttgagtttgtctcctgtactaaacagaggtagaaatgaccccccccccaggctgcagtaaagataactgttttgtattgcgagtcagtcatggccttcccttccagattctgagctcagtcagatctggaactagatgaggccaaaacagagttaagtgttacagctgggctggtggacaagacatggggattccagctaccctgtgcttggagtacccaccctgccctgcctgccagctaccactgccacctcagccagacctgggaatctgatgtggagactagatctgcagagacaaactcaaacaggctccccaagggaagagggcttcctctacccaccctgcaccccctcccatgagaaacagaaaagagagctgctggcaaggaaggcctcctaggccttaaggaggcctcagctacggcaggtagtagactcccctcagaggaagagttttgcattctcaaggaggtaggctatgcgtccttggccccacaaaatcagtcccttaaacagagacgtcaccaaccagctaagcagatgtgaccatcagacaaacaacctataatggtcccatttcctgagtcacagagtgacacccttcaacctgttccacgtcacacaaatcccaatggccaactccccaccccacccccaacatggccatcaaagcatctttccaaaccagaagtctaattcatgctgataagataaaatccaggctgacacataggtccagtttatgtctcatgttgccttccccttaccacatgccttagttgcttctcctgtttctgtgataagaaacaccctgacaaaaccaacagtaaaggaagtatttattttggctcagggttctagagcacagctcctcccccataacacccatcataacagccaaggtggctggagcttgaagcagtttgtcacattgtatctatagtcaggaagaaagaaagcaatgaactatcatgctcagctcaccttcttctcttcctccaatccaaaatcctagcccagggaatggtgccgcccacagtggacaggtcctcccacttcagtgaacctaatcacagtagtctcccagtgtcattctcagaactccatctcccagatgatgctagttgcataatctttcaagttgacaactgagattaacgatcacaccaccttacaagagatctctttccctatagtccccctaaccacttgccgtcccaagcgcattatgctcttgagtcttcctgatggaataaccctacccacatccagcctgggcataggtgtgcacctctcagaaccgtcttagaccacacctctgccttgatactcctccacactggcctccactgcagcttggccccttggcagcctgtggtgccacacttcagctctttgattaagcatgcacacagaagccaactgtctgaattcaaaatctagtatctgtgagaccttggcaaactagtctagctcctgggcttatttattggcaaaatatgggtgccaacagtaggggggggggctggaaagattatgcaaagttcagagagcacctatggagaaaacctgacctgtaaacgtaagccgtatttaaggtatgcttttaccttctcctgccattacttgtactctgttcttgtcttttttttttttttcttcaatttttcatttttaatcctcaaagacttttttttctggtttccaaattattcttggggttttttttgtttggttttgctgtggtttttttttttttctttccatttaaagtgttttgaatttatgtatctgggttttgactgcatgtatatctgtgcaccatgcgcatatctagtgattacagagtccagaagagggcatcagatccccggggactggaatcatagatggttatgagctgctgggtaggtgctaggaattataccaggaacttctggaagagcagctggtgtgcttaaccgatgagccatctctcatttttaatttttttaaatgttagcacacaaagcaacaggtttcaccgtggtctttttcatatacccattgtggggctgtgggtgtaggggaaagagaggggagggagagaacccacgtccggccagagttcctgtgctctgggcaggtggatgcgggaggactgctagatgctttccacttggcccctggtgggcatctggctgtgtgaagccactgaccccacatggtagggggtggacaaggggcagcccctgatacaatgggccccagggtgacactctcggctccagagatacaagtggagggcagaggaagagaggttctcatgcaggtgagggtccttagtctggccagtccgtggctggagcacagaaggccttctgatgggagattaggcacggctcgttaggagaaagcctatcccatcgtccaagcacagcggaccttgatgaacagagacagtctatggttttagagctttattgtagaaaggctagagtaggagggagagagtaagagggagagagtaagggggagagagtaagggggggagagtaagggggagagagtaagagggggagagtaagggggagagagtaagggggagagagtaagagggagagagtaagagggagagagtaagagggagagagtaagagggagagagtaagggagagagtaagggggagagaataagggggagagagtaagggggaagagagtaagagggagagagtaagagggagtgagtaagggggagagagtaagggggagagtaaggaaagtaaaagcttaagagagcaaggaggggccaagcagcccctattatagtgggctgtgttatcttgctgttgctaggtaactgggagtctagcctgaaggtcagaagcttgtgacattatgtgactactagccacatgcttctcctgtgggggctgtggggacggtaattttgacaggaggcaggggtccaggagacatgagagaacaccttctgttccatgtaggtgaaaacttccaccactgggtttcactggggttcagacctcaactggactggagaccagactgtgtatagcccaatgacccacaacccattactacccttaaatctaatttgtccccttcaccctccttcatgccatactccacattattttctttaaatcgactccccaagtctccaaggcagagtccacggagttctagcagatgagctggttgtgtctatataatatagatttagtaaaatgtataattcattaaataaaacctagctgtctgcggcatctccagccattggctcctctccctacacatgtgaaaaaaccccattttagacaatgactcagccatgtgtccatctgccagcaaagactatatacgctgtgcaaaggcaggcaccaaaggctgcctcgtgtctcggttagcaaatagtttataaattatcttgacaaatgatagccttccatcgctgtgcagttggtgagcagaggtggtctgggatacccatcccctgtttcggcagctggaacagcctatgtgaaggccagacaataacagatgaaaaactgcaaaagccagggaaggtggtgtgtgtctgtgattcccaattcaggaggccaaggtgagaagatggagagttcaaagctagcctaggctacatggcaatactgtatcaacaacattaatgatgacagaaaaatagaagagcgaatttatcacaggtccttggggtagccagggtgaccttccttcctgtttcctctcctccctccaacatatggatgtctttgctttttgacagcaggttagaagggggtttcagggtagaatgaatcagaaactggggggaggggggagcatctgatttttagcagcagcagcagcagcaacagcagcagcagcagcagccttccactattcacaaagcacctgtcccctccggcttgaagaaattagaagctaatgatttatattgaaatctaacgtcctatttctggcctctcttttgatggacaggtcagaaaatacagattgatttgaaagcctagagctctttaagaagagtagtagttactcctccgtgagactctaagaaatgagggggggggggaattccaacgccagggagggagcagggtcctggaggaaagccatgcctcctttcaaaggaaactctgacaaccacttctaatctgcgttcccttccccagccttccagacctcaaattggcagaaaataattttcccccctgtgcgaattaaaacgccctcgagctgcaagtagttagattctctggacagtggcaccgttctgatgttatcggctgtcttcctgttttcatgaataatgtataagaagaagcagatattaacggtggattcttccatggctgacggtattgccaccagacaagtctgtgaaccttccacagttgattcatctgtagctcttacaggtcttcacactctgggctgtcatgtgccaagaactttgggaggcagcctatccctgctgttttcttagcagtaaaaggaaggaaggagagaaggaaggaaggaaggaaggaaggaaggaaggaaggaaggaaggaaggagaaagggaagggaagggaaggggaggggagaggaggaagggggtcctctagagtgccgaacactagacagggcattagacaggccgtggcactgcannnnnnnnnnnnnnnnnnnnaaagggagatccacgggtaagcgaattcgagagcgaatagaaggatacaagagagcatgtcgaagatggtgagcaagaaaatgtagaagatgacttgtggagagtaataatagaagagagagataatagagtaggagagcagagaacaaagaactgaaaagagaatgcgagtgaagagataaaccacgggaatgaaaggtcaaaagttaagaggtagacagaagtgtcaaaatggaacagtgtaaaaggacaacacagttatattgccagatatgacaagtacacagatataaaagagagaagagaaaaggaaatggaataatgagaaaattcgagtggcaaattaacaatataaattagacattgataggagaaaagaaaagggttgaagtgtaccagagaggataaagaaaatgtaagaggtataaggaaggagaataggaaaggagataaaaaagaaaatccgaataccataaagtgttgaaatatagggaagtgtaaagtaaaggaaagaagaaggtaaaatggagcgcaaaaacagaaggagagcaaatacaagaaaaggacaagggaaagggaacaagagacaggatagaaagagcatggaaaaccataaacgagcccacgccagaccaggacgggacaaacaaaaaagggagaaagagaaggggaagaaaaggcaagaaagggaaaggaaagggaagaaaggaaaggaagggaagggaaggggaggggaggggaggggaggggaggggaggagaggagaggagaggaaaggaaaggaaaggaaaggaaaggaaaggaaaggaaaggaaaggaaaggaaaggaaaggaaaggaaaggaaaggaaaggaaaaggggggagaagaagagacacccgctgtctttcctccttctgtggtcccacatctgagtagccctggagctactggtggcaacaagtctgtcgacttgatgtctgatgatacctacatggcctgtatgggtcaatcagtccagctctgtacctaaatgcctacccagagaatgtccggcattttgggcaagcatttgggcaaaggctcgagtcagaaggaaagccatgcctaaacctgctccttttcctatctatgttcacacgtattatgtctttgggaaggaaatgaaaatcttccagccccacatttgactcatccatccaacatatttgtattttctgtgatgcttcccacgggagagccacactgagatcagtgattacaggacgaaagctagcttgttaagaacatataaagggttaataaggaagtcagtacaggggatgcgagtgaccgacgagctagggtgcagaaagatgacaaactgggagactgaccgtgcattcaaggcgctgggaacagcatgcacaaagtctctcagagaagtttagggtgagctgttagaggaacctgaagatagcccagagcctgaggttcgtaaatttggcttcaacattcaacttgaccctcttccttgattctctgataccccttagggactgaaaagtgtttcatcttagctttttccacccacctgtttccacaccccccctcaccctctgaggcttacaaccttcttaatgctgcaaccctttaatacagttcctcatgtcgcggtgaccctcctcaaccataaaattacttttgttgctgcttcataactgtaattttgctacttttaggaatcctaaggtaaatatctgatatgcaggatatctgacagagaccttctaaggggtcgagacccacgctgcttcatgggccccgtcaactgctccttcatgtggtcattaaaaccaaactcttctcatcatcagagcctgtcacctagaaagaacactccgaatgcagtgagcgtttgctgagccccgggttgagaacctataaagcatcctgaacgccccgcgaggcgtcgtgaaataagtcacaatcgaagctcggtgaaataagtcacaatccccaccaccaccaccacacacacacacagcagtgtcatccagtcagtcaaagggatggttctcacactaatgatcttagatatttctcagaatataacattaatctttaaaagcaggatacaaaattcatcataaggcacattctctgtttcatgtggaaaaaaaaaaatatatatatgcaaagaaaaagagaagcaaagtcagcaagccgtccctggcagtggcactactggggacttctgtggttctttttcatgcttccctgattcctccccccaccaaaatgcgttaactaattgaaataattggtgattgaaataatttaatttatttgaactatagtcaggcacttaatacatgtcagtatcatttgcaattcagtgacacacagaatattaatacagtttccctcctaaagaaaagtattgaatttggctgcttggttttagtgtggggttgtagctcttgttctgagacagggtttcacgaatgttagagaatgttagaccttgaacttgttacagagccaaagaccaccttcatttcctgagcattgctggtgtgagccccctgtcccgctcagggaacactttgggaattgtagtgggttagcttgatgctgcttgtattataatgctaatattggtcccccaatactggttgccccagagaggagagagtctgctcatagggtcactaagtgacccttccccgattggtaaataaaagatgtcaacagccaatagctggccagaagggacataggtggggttcaggtttcatggacttgaggtcagaggagaaccacagagaaggagagaagatacaggaggaagaaggagaagccaccatgggttaggtgagccataaaaatgtagccctgagattttaatagcatgtaggcaggtatccaaccagctctcgtgctttttaaggcttattgtaaatataaaggccacgtgtgtcttttttttttttttccagaaactaaagggtcaaaggcagggtagcaaccctgggttgggattaaaaatttcaacaacaggtaatttgttttcttttaagataagttgctttttaaaaacaaggggtaggggcttggtagatggctcagcagttaagaactcagacttgtcttgccaatacctgagtacagttcctgttaccacacaagctccaagagtgtctgatgcttctgcccttggtaggtttctacattaacatgcacgtgccccacccctaacaccccccccccacacacacacacacatttaagaccagttattgaaactcctggaaaataattccaaatatgctctcttctgctgacactggaagggcaaatgccatcaaacagcatcttgacagtccctgctaaggatgccaaagacacatgagtgtccatttgtcccttctcaccaaggcaagaacaaggcccctcctgtcaggtcctttcaaccccagcctccgtctccatggagctgagagttctgtgctgcttgcgcttgcgcttgcgttacagatttcatctccactcccctgcctgctcccttcagctcatcccccactgcaggtacatttctgagagatttccccctaggaatgaaccttccaggattcagggtagaagcccatgcctgaagcccagctctgactggctggatcctaactgtaccctgtgcaggcaggggcttgtgattatactacagacaaagccagtggggaaacagcaggagcccaaggactcccgggagctaagagtgattgtttctatgcaaattgtttttcatagtagggagataacaggcaaatgaaatataagagcctggcagagatttttttcctaaaccaagtctgggggctggggactctctgatagaccctcagcgtgtctgttttaaaaagaatcttttagatttatttattgtgtgtgtttgtgtgtgtgttgtctgtatgcatgtatgtgcattgtgtgcgtgtgcgcgtgcacgtgtgtgtgtgtgtgtgtgtgtgtgtgtgtgtgtgtgtgtgcctgcgagtgcagtacctgcagaagttggaagagagcatcccatgacctggaactggagtgacagatagttagttgtgagccatcaggtgggtgctggggaccaaattcaggtcctctgcaagagcccacactcttagctgtggagccacctctccagccctaagctcagcttgtctttaacagggaaacgctgaacgccccataaccccaatcaagcagaaccaaatttgtctctagtgtggctcctcttccaagcctagcctcatcagcgactctttctgctccgccagcgttcaacttagccttgactggagggtttctttcagaatatagtagtactttctgccagggaaaactgttttaaccaaagcatgagcttaagtgacagacaggaggagcaatattaagtccaatcagttaatattgagttgtcaactttcatatgctagggggaaactgtctagaacatcaaaactataggttttttattattggctacggcggcccaagctgtaaaacgggagttaatggagagccagcaaagagaaacgcactaagtaagtcatgatatgcatgctatgtaaatgtgataaaaatacccgtgaagtggcgcatacatatatgatgtttggaaaacataagaagcaattctgcaacaagtccaactcggctcctggggaagggccagagaaaattagctggctcatggagggatctcaggcatggatgtgtgtgttgaattctggatcatcaatcaatctttgcacttctgaatcctgaagcctcctggagtctcagatctaagtttaaagacgctatacttggtctctggcagggaaagggactttgttataaccatcgggaaaatttacacacacacaaacacacacactcgaaaacacataaagagtccactataagaataaaaactgggagctggagagatggctcagaggttaagagcactgactgttcttccagaggtcctgagttcaattcccagcaaccacacagtggctcacaaccatctgcaatgggatctgatgccctcttccggtgtgtctgaagacagctacagtgtactcatataagtaaaataaataagtcttttaaaaaaaatagtaaaaactgttccctgtggcattgtgtgcagaaatgagagggtgaagaaaggacagagatacatgctcagaagaactggggccgggcgggctggcctcattctgctggatgaagtcgcaccaacaatacaataataacccagaatctcagaccatgtattatgtacagtgccgggaaaggagttagctgggcatgggaggaactgtctatgggcagccatctcaggctgtgagcatccaggaggagcaagctgcagctgctctgattgtgcgcatcctggtcaatcctttgtgaacaccaatgcttgcactaggaccagaggaaggctttgtcatccttcggaacctcacccagggaaggcattgccactcctgtgggtctgaggcagtgaggtccttgctgtggcattgcctatgtagaacaatactcgagggtccctccactactcacagtcgccccctgctggttgctgtaacttttcctatctgacaaaacaacccaagttcatccctaggctgccgatgccttgtagccctttggcaggcaggaactcattggaaaccactaaatatgttagcttgactaaaatgtgggtagggataaagaggcctctttcccctgtgcagtacattatcatgcatagaccacagtcaagtagtttgggagcaaatgttttgggttcaaatccagcctttctcgttacctgtgtgatcttaggcaagccattaacttctctgtgtttgagttgcctcctctgtaggatggagatagggctgtttgctgcataagatagattttcatataaattaaatgagtatctatacacaaaccacttacaacagagctggcacacagtgaaggttgtaaaaatgtgacctgttgtatgagcaacaatagtcttccctcttatgaactaagataaaaatcttttcccctagacatcattaactcagccatatgccttttgcaaaaaccatgaattgcagtctttccccctatccttccataggagtccccgagctccatccactatttagctgtgggtctctgcatccgtctggattaactgctgggtggagcctctcagaggacagccatgcaagacaggagtcttcaagcataacagagtatcattaatagtgtcagagattggtgcttgcccattggatgggtctcaagggggattgcccagggtgagaagttctcaccctctcagaggagaatgggatctgatgccctcttcccgtgtgtctgaagacagctacagtgtactcatataagtaaaataaataagtcttttaaaaaaatagtaaaaactgttccttgtggcattatgtgcagaaatgagagggtgaagaaaggacagagacacatgctcagaagaactggggccaggcagactggcctcattctgctggatgagaaggattatgggagggagtaactaggaggggggcagggagcaggatgcaaagtgaaaagaaaaaagtatatactactcatgtgtgaaacctaaaaataaataaatgttaaaaaaaaaaaagataaataagtgccagccattgcagtaagccctggaaataagaaaacctctttctccttaagttccctactgagtagggttgggggctgggcataagaggttgtcgctcagcaagctctgccaaaagagaaagttttctgtccctggttgatttggaatttgaggaaacactaagcaaacaccatatgacagttattgaagttaaatgaagcaaaacttgtgtgacaatgtctgaaacaaatgggagccttgcagagaacaaataattagaatcctgtcagacccagtacataaacttcggctcccaaacggtcgggggggggggcagttgaggcttggaaagtctacccctgccgtggagcagagtcctggctgaagtccagaagaatggaatcctggtagaagcttccagaagagaaacgaccaaggacatgtgagttacactccgatacacatcatgtttgaggaagcacgggctgtggatagaaactggaaaaatccatccaggttcagagccattggaatccggctacttctctttgtgaaaacttaagtcacttgatgtcagcttacctaagttgtcctaactcatggtatatttctgtaacctcctttgggtctgttagcaaaaccagggcaacatggtgtacctgctaagtggccactatcagaaggcacacatccaagggcagtcacttagctctcgtcagggagaattaactcctgaggtggctacacttccttccacagaggatatgtcaatcaacagacagcgcttctttttatttgtaaatgagtaccaacgtttgtttttattgctgaaattaatgccttgtcaattagcaagctacatgttagaaaatgactcattaaagataagtcaagatgtgtggttggctcaaaatgctgagagatagataacgcctcctccccaacacacacttttggaaccacagggaataagaatgaggttaggcctctgaggtggtgcccagtgtttaatgactcctccatttgccttgagaaatgttttcttgtgtgctgcccatcagggtccagggtctaacctcacagagtttttctgtaagtagtcttttgtcctgtgtattaacgcatagaaaaggccagagatacagagctttacccagtctgcagcccccttatatgctcctgtggctcattaattgctacctacaactacaagtgagggagaaggcagcttgttcgttgtcttcaattccactaggccctacagtctgaggaatgttctagtacctcaagctgtctcctggctgttgctactctccaaaagaaaatgcagtgtgtgactgacctagactagttggattctcaagctagaacttcatggaatccagtcttagcttgctctggtgtgtgtgtgtggtgtgtgtgtgctcatgtttgaggggtgtggacttatgcacagcacatcaatagattccaaaagatagcctcagatattatttctcgatgtcttccatcttcctttgagacagggtctctcattggcctggaacctgaccacgtataccaggttcactagcctgtgtgcatccagagatcttcctgtctctacctctcctttcctgttactaggactacaggtgttctgcaaagaggttgcttcgttttgcaggttatggtgatccaagctcagatctccatattcatgtgcaagtattgtacaaactcagggatgttcctggccccagttcttgacttttgtgtatgcgtacatgtcccaaataagcttgcccttctttaagttgttttgccttgtgccttgttacaatagcaaaaagagtaccccatatgagggaagaaaatggttgtacttagccatcccccctcccaacccccccccctcccgcagggatggctaggtgtagtgacaactttggaatcttggtttcttttaaaaaacatggaaatattataacaatatgttctcgttttaatcccgggtgaggataagaggctgcttcacagcagctgactgtgatttgcctcatgctctagcaggggtgtgatcttgccagaggcagatagtttctacaattgtgtaatgtttggaattctgggccccacgagaggttgcagggggcggggggggggggtagtatttgctggttgctgttggttgtggtaggttgctgtttttaagtagtgatgcacaaagaagaagcaacaagaagaaattagatatcccaatggtaaagatcaaacttacccccaaggaactcgacgcctataatcagcaggaagcagtctaccaataatgttaccctcttttgacctctgactttatttgggaatctctttccttttctctattatttttcactcttatctagggttagggggctgaagggtggaggaggatggaagaaagaagaacccacaaagtcgcaaaaggcagcttcagacgggagcttagcacactggcaataaagcaccaaatgacgcacgggacactgatttggggtcaaatttggaaaaaccacgattcttggttagaaactgagaacaacagaagagaggaaccatagtcatccctgatggactgacccttggcttaactgtgccagcaacagaacagtgtggatatagcaagaatcatgttactctttagtgttgtagaagccagaatgggttaaaggcgttgcaggttgtctgcttctcagggctctgatggcctgtcctgacacatcttatattctaactgcattatagcttctacatccggagtcttataaattgtcttcttgtccttttccttaattccagggtctctcttagtgacgtaagctggcctggaatccctggaacccacagcaatcgggcttctgtcttggaagtagtgggattgcaggcttgctgcaccaccatgcctggctacacatctccctctgataggaactttatcctttgcccagctccaaagggcagcttcttctttcttcttttttctcttcttcttcttcttcttcttcttcttcttcttcttcttcttcttcttcttcttcttcttcttcttcttcttcttcttcttcttcttcttcttcttcttctcctcctcctcctcctcctcctcctcctccttcctctcccctctcccctctccttccccctctcctctctcccctcttcttctctctcccctctcccctctccttccctctcccctctccaccctctcctctctcccctctcccccctctcctctctcccctctcccccctctcctcccctctccctctcctcctccttcttctccttattattattattaatcaatcatatatatgcatgtgtgtttatggaagaatatgtgcatttgtgtgcacgtttctgggaggccaggaaagggtgttggatgccttagaactggagtcacagatatgttgaactgagtactggacactgaacttgggttctctgtaagagtagcatgtgcttgtagccactaaatcatctctccagtccctagagcagtggttttcaacctgtgggtcatgactcctttggagccatcacataccagatgtttacattatggtttataacaggagcaaaattacagttatgaagtagcaatgaaataactttatgcctgtggtcaccacaacatgaggaactggattaaagggtcgcagcattgggaagatgggaaccattgctgtagagaaaggtgtctctatgtctatatgtctatcctacacatagacagtacgggaggactgttctatggtctttatgaatcaaagaagccaaccttcttcatttacatttcagttaaattaatttgcatattcttttgctgagttgtctgattgagcacaagtcaggttaatggctctcaatcgtgtccctctgaattagtggcacatgtatattcccaagccagaagcagggatgaagatacactcctgtaatctcagcacatgggaggcagaggcaggaggatcaagaggtaaaggctaacctggactgcagaggagacactgtttctgaaaataaaagccactgtatcattcatggttgcatacggtaccacactggctaatgtctaggctggctccatttcttgggtattgtgaacagtacagcaaacacgaatgcggcagtttctctgtggtatgttgacttagagttctttgggaagactctcaagtagtatataaagagattgtggtagatatccacaatggagcttcatacagctgtaaagaaaaatgaagtcattgcgtttgcaagaaaatgaatggaactgacgatcattatggtaagcaaagcaatccagacttagaaaaacaaatatcatgtgttttcttttatatgtgaaacctagacttaaaattgtgtgtgtgtgtgtgtgcgcgcgcgcgcagtgtgacaaaactagaaatatgaaaaggaggaaagagatcttaaggaaggggaggaagaggaatgggacgtgtatgtggaagcagaacgtaactctttgcaggaaggaaaggaaggaagtgggcaaggggcctaggggaaagatggaggcgggagggaatgaatgagaaggaagtgtatgccacacgtgtatgaaaacgtctcagcgaaaccagttatttactatattgacctaaaacattcatttaaaaaaacgattacaaaaccaagcaaacaacaaaactccacatacattgcagaccgcatcctctgagaagcgctgttgggagtgcgcgtgcgcagttttcaaagctttcccagatgatttcagggctgagagctgagagcggggtatgatgggctggagccccacatactttctcgtccctggcttttcctacacactggtcttccagtaacagctagagagggcctgccctactttagtgagtttaggttcaagagcttgtgtgaacgggttttgaaacctaacctatatagtttcagaggaggatctggtagccagcagtcaggccccacctgcgaaggggccttgtgtgacatttccacacgggtgcacatggtctgctcgctgcaatccctccatgctaaaaatgggaagagagtaggtggagctcaaaatactttaagtgcagaggtgtgggcagcttccatgtagctaggtaattctggacaaatgaaagcttgtctccgtgcagctacatttatttccaaagagctggtgatattccccccaggaatacattcatttcactctcagttttatctgctttgagatctttagaccatgggattagggaacccccaggcaggaagcaagaggcagaagaacgggagctatttatccttgcctcagagttaacgctgggagaaactgaaagccttttgaatatgggagataaaatgcaagaaaaatactaccttggtctcaacatcaaacaacaaacacacacatgcacgcatgtgcacagacacatactcaccccagtaaagtgcctaggttttggctactatagaaccctcactatacataaataacagatatacataaatattccaagatgttgataaagtcttctttagaatacaagggttttatatcagatctgtttgtttctgtgcagtacaactcattcactctggacatcacaaattggctacagcagaaaaatgcattaagaattatgatttttatcaatacacatgtgttataatttatattatattataaatatattaaaataattatacatttgaaaatattaaatatattagaattaatatataaatgtatacatatatatgcataaagacataggaataagctaagcttttgcagctctgattaagctattttgaacttcttaaaaactcaacaaacacatactcctccttaagacaagggttttcaaactgtaactctgtcttagggttttactgctgtgaacagacaccatgaccaaggcaagtcttataaaggacatctaattggggctggcttacaggttcagagattcagtccattatcatcaaggcaggaacatggcagcatccatgcaggcatggtgcaggaggagctgagagttctacatcttcatttggaggcagctggtagaagattgacttccaggcagctagcgtgagggtcttatgcccacacccacagtaacacacttcattcaacaaggccacacttcctaatggtgccactccctgggccaagcatatacaaaccatcacaaactcctaccagtactgccatctgaagtaggtgtaggaatctaatcccagacctagagagctggagcagactgggcaaggatgaagagtgcatttgaagcaagcatttcagccaccaccaagaacactgccctagaggtgcacacatgtgagcgttagtcagaaacatccacatgcccctgactgaaccaaccatggggggtcatcacctcttccctaagcttggctgggatgcctcgtggcagaaggcacggtgtgaaaggaactccagagctcatgtctgttttcctggcaagttacaggtgtgggtgccattgaagttcattacagggtgggatttctgacagggctaccccggtacgattgtgtgagtggagcactacaccaggtcatcctatctgaagagccatcatttaatgtaaatagagtcagcttgcgtgtttattatgacagttttctccagatggctgcaatgtatcatattctgaatcggtccgtgataatgatttcccaacagatgtatgcgtggtgagagggtgggggtcctcagtggggggaggggcactttgggctggctgtagctgattctggttctggtccactgattttttttttccgtttctatgaggaagtccgtagtggtaaattaattaaataaatccgggcagcggcacattcttcgctacccactgcagtgttctgggttcctgaatgaaagatacacacacacacacacacacacacacacacacacacacacacaccctttatattttaatatgccttatgtagcccaatagctgggccacttcctaacctccatgtggctaatccacttccctctgataaccccgagttatcatttattttattctgtattctaccttggctgccttggacccagttgggcggccctcctgggccacactctcctggctcttaaatgttggccatgcctctctgtcctgcatcttctcagatgtagtatctcttctcccagcgtggcagatctctttgctttctctttgtccctagctgggggaatcctctgccctgcccagccattggctattgacatctttatttaccaatcagaaccaactgggaaccaggcccctgaatatcctattcctagacactggattgaacagttttaagaggtctaaatttacataagcatacaagcagctacaaagtttcctgctggggaaagggcttcccgacttgagttaagtttcacaaggcaggttacctacctttctataaatgagtaagacgtgaggccttgcccgggtttggggagttttaagtacagcataaaagtttatatgaaagggttcaggaaagcaacccatcatggttagctttttatcaactcgatgacacgtgttagaaccatctgagaagagggactccagaaagtacctccttatgtttggcctgttcacaagccttggggggcaggggaggcgtttccttgattaatgactgatgtgggagggccaagctcactgtgggcggtgccacccttgggttctgggttgtactagaaaacaaactgagtgagccaataagctctcctccatggcctgtgctttagagcttatctccaggtgcccaccttgagttcctagctgacttcgctccatgatggcatgtgacctaagagttacacactgacagcagccctttcctccttacggaggtcatggtgttttatcacagcaataggagttccgactaagacaccacctgagcaccagtcttccattcctccactgtgtggcatagtcccatgacgtcatgatcccatgacaccgctcagcttgcagagggggttgactctggtcaccagcttcctcctaatgtgctcgaactggacttcccaggaaatctgaccttctgttttttttttttttcctttctaccacttatgaccaatttaacaaataatacaggccatctctctgtatcatcaccctggctgtctaaaccctacttggggatcttgcagtactgttcatcacccccaaaatgttgagatttaagcatatgttccttatctcctctaaaagacacaaaaagaaacattttttttagagaaaaggtagtgggttctgaaatttcctccttcctccctcttgcccccccccccccccagcctcactgaccccctggcagctgtcagggtgacttctccccgcatctttacttctctttgcaagcttggggagaaagaggaagtatagggacgggtgggagtggtggcgctgctcaaagatcttctggaggtaagccacctagaccctacaattcctgaaagaaccaggagagcacacagcccaacaggtctgttgggagccacacgctttgcccggtgctgacggcttcttaaagacatacgtcacagaacaagaagatgacatgttgactgaaggtgactgtaacaggagtctgatatgttcctttactccgtctgtgtgcaacacgtgtggattcctttactgagcacgcactatgatccagcccttttggccaggctttgtggctgatcggtgagcacatcgctcgctccccttctggggtgagtgaaacagcagtagagaccctcagtagttagcctggcaagttctttgagcaactccgcacactatggagtgctctgtgggtaaagactgtcacagggagaggtccgagtgagaaggaaaggctgcttgagatcctgagccggaacaggcaggtctacgcaggatgtttcagttgatcgcagcaggagagggactagaacactgaactgaaaatcaggacgtaagtgcctacctgtttcctgtttcccagctcccctggtgtctcttcatctcctttgctgtttctactggcaaatgagaagcactgagtgccatgcccgacacaggtaatggctcacacttcctgagtgcccggggcttgcctgagtgtgttgttatctgcgctaattccttgaatcttctcaaattccccaggaaagggcaagcaaggtttgggtctccgtggaacagatgaagatactatacaaaacacaaagcaatctgaagctcagaactggtcacttgatgatggatagtatcctggtcctacttagtgtctcagttagggttttcattgctgtgaagagacaccatgaccaaggcaactcttgttagggacaacatttaattggggctggctaacagttttcagaagatccgtccgctatcatcatgttgagaagcatggcagcaggtcagcagacacggtgctggagaaggagctgggaagtctacatcttgatccgaaggcaaccagaagaggagactccctctacaggaagccagcagcctgagcatagggcctcaaagcccacttagcaagtgtttgttgagaacccactaagtgctcgacctgactgttgagccaagacacaagcttcacacattcaaagtcaaatgaaaagttcagtagaccagtgcttgggggggtggggtgggggaccaccggccaaacagacaatgactctgaaggtatgttcttagatttagttcactgtttgaaaagtgagcattcaaagtcatattttcttataactgtttcatgtgtacatgccattatcctttcttcttatctctcctcctccatcccttttgctcctcctttgctgggctcatttttttcctaaataaagtcggtagctggccaatggcagaatttgttgttcttttaaatctaaattgtctgagagagatgtctccccccaaagtaacttgatttcttctcaattatctatggttttattgtagtttttctattgtcaaatgggtttttaatcttttgttaaaattttttttaaattatatgtctgtgtagctgtgggcatgtgagtgcagtaccagaaatggccagaagagggcactagaacactggagctgaagttgcaggcagctgtatgctgggaactgaacttgggtcctcttcaagagcagtatgggttcttctcaaatcgtctcccctgaccctaggttttaattttttaaaattacagataaaaaacctagtcgctgaaagcattcctaataatcagaatagtaaccgttgcagagaattcatgcctgacaggcttctcagttgagaaagaactgggttttcctcacaataagacactgacctgcatttcctagcagagctggggctcttgcccctcccactcccgcctttttcattccattcagagtggtcctaaaataaacagggagaagggggcctgcccgccactcccctaagcgaccggcctcgtcagttatgattacagctctgtatttgtttttcaaaaagatgaaaaatcacaggagttccttatttgaattttaataggacagcattttccccatcgcctgagagtgattttgtgcggtaagcaggcagcctctccaggcagagtttgatttccctcttcctaaatcatttcttttgtctgaagtcgtgcatgcccgcacccgaggaggcaagaacaccacgagagagattgtgaaagatcaaaatattcagtgtttgagcagcatagtctacggtaagtcccgggggtggaccttctccctgcagcccctgcaccggaccttttcttttatcttcctgtagctgaacctgtctcctcatcctcaatcatgtttggcgagtgctttaccactgaactgagcccccaaccctttttgggagacaaggtcttaccaagttggctaagcaggtctgaagctctccagatcatctaccatagtctcctaattggctgagatttcaggcctgaaacagaaaaccccacaacaattactttctttctttgagacagtctctccacagatcccattgctggctttgaagtcatccccctgcctcaacccctccagggctgggattacagatgtgcaccaccacgcctagctcaatactactattttgtttggttgattatgctggagtctcatgtagccggggctaacccccaagtcgaaggataaccaggaactccttatgtccctgcctctatctctcaagtgctggagagacagcctgtggcaccatgccctggagaacatgctttttaaggagcagactgtaagttgccacatgattatgtgagtagtaggtagggtacgacatcctgagctattagtggcaggagtcacagactggctctagtattccatatggacaccatgtggtagtgggactttgggacagcagtagttagtttagctctgtgaactctgatagtttaaaaaaaaaataacatctctatctcctggaactatgccagctggggttgatgtcaacttgccacagattagagtcaccagggtagggagactcacctatagaagtgtcccgattaacatgagagatgtagggagacccacacgatcttgggccacaccttctggtagcatcccacataagaagagcatggcaggagggcagctgtgctttcgattcctggccttccctcttcctctgagatcgtccgccctgttgctgcttctgttgctgctactgttgccccttccctggctgcagaatcagcgtttccaaactctcatcgtggactaagaaccggcagctccccaggtgcttgcagtcatttggtgccagattggaagtgctgaaggacccagctctatggttgttgggcccctgtcccaaccctagcaagtgacagccattagggggactcctccaatggctgagacacacagcctccaggaccaaggaactactagatctcagctctcaggtgggcttctgttgttgaatttcaaagctgacttaataactttgtgtgtgtgtgtgtctgtctgtctgtccatctcataggtcctaatcctctagagaaccttgactaatacagtaaccaccaactgaaatttagcatgtcctccaattacaaatgtaggcgagaaattggcacaggtgcaaggcacagtagcaccgtgactttgttaccagaacgaatcttcttctcaggtcatgtgagctgtggcagatttcaaggggtactacatgcttgctaccttggatcggcactaagaattatctgggctgctagatctcttgttacttactgttgctatagaagcacagatgtccccatgccatgatgtgtgtgctttgtgtgtgtgtgtgtgtgtgtgtgtgtgtgtgtgtgtgcatgcacacgactgtgctgtgctttcctacgcatgcgtacgtggacaccagagctcatctttggatgcctttctcttttgccctttacctttcttgttgacacttgagtttctcattgaatctagtgtttgttgttcacctagacagatgggacacggagccctggggattttaccagcctgttagagaggggcccatgctcccctaactgttaaagacctcttaggagactcaggatagtcccactgcaaaatcagatcttccatacagcaaaaagacctacagaaggatccatttagtgcccgcccttgtggctttagtcacctcttttcctcttaacaaaaatctcaaatgcagtccacttgtgaaatcatcatttgatcttttaatgcccggttaaaacgggatcagctttgagctattcaagagctgactgtctctgcaacgaattagcaaggatccttcttctctgcctcatctcccaggcgcactgacaaacaggcagggcagccagaggagatggcactcagatctgatcattttcccatatcgctgagaagttggaaatgggcggaggctgcagtggtgattaagactcggaatacctgtggcttttaattaccattccacgcgtgttccagtgtcctcctccctgacctcgcactcctgtggctgtaatgaggcaattatcagaagctattctgtattgttagttatctttgcatgcaaagatatctccctgagccttctcttgtactgcctctagtacttggctgacaagagatcctccttaagtaggcggggcgacagtaggtcctccctaagtgggcggggcaacgatagatcctccttaagtaggcggggctcaggtgaatatccagctactgtgcgtatttagagggccttcactctcgaagatgcccaggcaaacacactcattttcttttcccaccttgcatttgtttctgccacatctattctacaagcactgtagaacacttactatggggtaggtaggcatcatgctgacattagatgaaaagaatataatcacttcctttgaggaatttggggctgtaggaacaccagacacataaacaccacaaagaatatgacaaagggaaggtccactctccacaatgggtatcatttaaaaattaaaaattaaaaaagatgctaggggcagaacccgaagaatgagtaggattctatcatgggaagagaaaagtggccatcttccagaccagagggacttgaacttgtccctgctggagcagtacacggaactcttcctgcctcaacactcattccttctcctctctcctcttctttgtatctgggccgatgctgaggaaggcaggctatgctcccggccttgccctcagcccagccccagccccccccccccaactcccaccccctgctcacgaggcaatgacgatcactccatttctctttgccaatctgtgacgtcaggtgggcacgtgaccacactctggctggtgcgatataaggggaagtctgcaatggagactttctcagacataaaatgacagcatctctcggggagagagctagcctttcctttcttgtcttgaaaaattcacatgatgcttgcagctgtagcgactatcttatgacagcagaaagataataagagcccggggcctctgggagagtagcactgaatagcaaccagtactggcaactggactccttgtgttgggggtaggacgggaggggggcgattaactcctgcttgcctaggctataaacttgggctttccctcccttatggctaaaagtccactcaaactatttccatacaatgtttcgctgtctcctcggtgagtgcctgcagtgagatcgctagagacacccgtgagttttactgttgatcagcccaagctgcggccctctgggatctggctcttgctccccttcatcttctccagtcattttgggaaactcctcaagagaattactttgagaaacttccctctttctctaaagggtcacagcgttaggaaggctgagaaccactgctccagtctaatggatccctcagcgtttgcccatccacacagcttctctgcagctagctggagtccaaaccccagtgccggagcatatgaagggaatagagaacacagtactgccaaagacaggcaggcagagcctggtgtatccagcctagtgggttacatgggggggtgttgatagcaccccgtcctctctcccctggggcttgctgaggagagcccgccatggagagcctttaggcttctcaccctcagtttggatgtaggagattgttgccaagcaggggtgaagtcctgagaggaccatgacattaaaacatggaagaaataataatgaatggtcgaaagacttccagccggaagttcaacaggaagttatctggtgtgctctctttttttaaaagatgacagatgaaaggctacatatatgcccagggtaatgaacctggggccagactcccaaccagtcctacctaaaacagtctccttataaacagaggaggaactaactcaagatgtcatcaggctgctgaaatagacgggagtcaggcacagtggcatacgaatatagttgttgaagtgctcaggaggctggggggaaaaatgacatgagttcaagaccagcctgggctgcatgcaccacaagaccatgtctcaaaataaacaagcaacacatgagatctgggatgtgagaaaacgagtctattgcacatgtcgggaccacagtggggattagtcaccaggaccaagggaactgtctgagatgacttctgcctttcatgagagccagggtataatgtggtatactccagtgagactaggaagttacagaggggaaaaaaaagtactagaaacttgatttgaagtacctgtgaaatgaacaagggggatgtccaggaggcatttagatatatagatctagtcagggtaactcgggtgcctctgtcttaggggcatcggcacgtggtgaccatgggcacagcaacaaggagggtgccaacaaagagtacatgacttcaatggaaagatggggactaatgacacaacactggtgggcttcagtgaggctgtgtgtgtgtgtgtgtgtgtgtgtgtgtgtgcgcgcgcgcgtgtgtgcgcgcttgcgcttgtgtgtatagtgtatgccatagtatgcatgcgcatgtggaggtcaaagggcaaccctcaggagttagttctctccttctgcctttgtctcagtttgaactctgcttgttcaacaagcactttgaccactgggccattctgctgcccctgacctctactttctctgagctttggctcctttgccatctgttttccacagcacttttcttagtaggcagagaacaatgttgctgacagtttcaggaaaccacaacctgaagttcctcccccttcgcaaaataatttctgtttttgagacattgtttccttatgcagggtaggcttgccttgaacttgggccgtttctgccccagtttgggatgaatgctgagattataggctagcatgatttgctcagtaaaagactattattctctcactgtacatgtgacagtccctgggaaatactctcgttggctttgtctgcaaggatcatgtaacctataccaggtctctgacacgtggattgcccaggtttgagtcacatctggatgggaagatgggagattgggaggatgtgtttccagaacgagaccgttaaggctttccaggcagagaagagtagttgccatggttctcagcccatcaacatttaagaagagaggaggaggaggaggaaggagacacaacgttgatatgtcaaagtagatcaacagctttttggaagccaagatctgtttccgatgtgtatttattcttctacaccctccccactatctagtatcctgccttaacatgcctgtcatcaacaagtgggtgtggagaaaaatcccagacatcacacccaacaagcaggggggggtactttaaaaaaaaatgacaaagactaacaagcccagaaatctgatttgggcaatatacaaaagcacaccccccccccccccagtatttggcctccatgaacacagatattaatagattctctaaagagagccaatcttttcaggttttggacggcaccgtcatatcagtatgaactcaaatcgttccagatgaggatgacatttgaggagtgtcttgaagaaaccgggtagtgatataaagagctctgttcctgctactgtgttctgggctcaccgtaatttcatgctgcatttgaaagcctgcaggggagacaccttaattgctacggatgccaaataggaagaagagtgctaatcaaaccttattaatcgacgacatactaccagctttcaggaacagatgctaagggggaatgaaaccttgtaagccacgggtacctaccaacaccccctcaggtcagtaacaattgtttttcttcacatacacctttcctgtccactagggggagtactagcgcacgccaaagcatggctttttctatgcctgatgcttaaactccctatgcctaacaaaaacttgttcgtctgtagattcctaagacctccagcctgtgatggcccaaagatctaaccagatgtcatatttttcaaacagacagagtatatcattcaaggtatgttaagaaaatacattgcttaaattctcagtaactcagaaccatcttagtgaacatttctcttgtaaacagaagtttctagccaggaaggcaaaggcgagggctaattatttgtcagaatctttgcttatttaaaaaaaaatagaagatgctgaatctgtgccctttcaattttaaaaagcttaattttaatacctgttagacactagtatgatcttttattgctcagtggagttcttaaagtattattggcactcagttgataattattataattattataagcttgtctaacataattacagtataagactcttccctcttcaacacaaagccactttcaaaaaaagtttgagaggctatgtaaattaacaaatagccgaaatgccacacttagcttcgcacccagcttcgctgcccttccttcttctcagttctgtatttttttgtggcagggtactgcatttttttttcctttttagtctctgttgagaatgtcaacccgtgaattggtaagcgtgttattgtgcgtatgccaagtcaatgtgtttggagctgtggattcctcaaagactgacacccacccctgcagttgcctgcttttgcagaaacattccgacaacatcgactcaacactgaccctgtgtgaagccccgtaaacggcataggacaggacagcattgctcctgactataccctcagccctatcacatgcctggcatcaggagccccgagggtttcttgctaaggacataagcaagtaaataaaaggtttgagatgtgaaagttttgggggcacaaaggtcttgtttgcccagagattgctagagaaatcaagagcgctatgcatgcagggacctctcctcaatggaggagataaaatacctgttttcactgtctagaaggctgggagtgaatattgttgacggcccggtgacctttttgctatctgcagcagcagcagcagcagcagcagcagcagcagcaacagcagatctcacccttttgctatagagatagacctcacttaaatcccccacaacgtttattccagactctccctccctacctcacaggtaatagaagccctccttagtgggggaatgtcccatgtaccctgtggcctgttgaatctctgtcctgagtcagagaccacactagaatctaggctttttagctatggaacctaccctcgtggtcacatgtatttcataaagcagtttctaaatgctcacaccttaagctttattctgcacctggaatcggaatgattgttgcctggaaacctggaataggaatgattgttgcctggaaactttttcccaaattgtactgttttaaacatgctgacaatgaaccacctggtaccaggctcctcaagtctgatacaggacggtgatgtcgatctgaacagaggttttattcttgcctctttgtggatcactgccttcattgacaacttcagtgtccccacccaccaagaaaggaattgtagagaaacactaagttgctatccctgacctcagaagagttaacagtggtatgaaagggtgcttggcctatttatctatttgtcaattctcccatctatccatccatccatccatccatccatccatccatccatccatccatccaaccatctatacatccatccatctatacatccattcctctatacatctatacatccatccatacgtacatacatatatctatttatacatccatttattcatctatatatccatccatctataaatccatcatctataaatctatctattcacccattaacctatacatccatttatatatacatacatctatacatacatacatctatatttacccacccactcattctccagagccttaaacatgctaagcacatattttcccattggactatatccccaagtctattgtcattttcttaaaggagctgagagtctactagagagctttagatataatttaactactcacacagaaagtatcagacaaataggggttcacaaagtaagaaacaagggaggaaactttaggtaaaattaccaaaaatgtgaagacctggaggcagaaagagccccgcttgcttaagaaacatggccaactctgctaaaaaccagtaccagccacatccctcgctctggtctaaaagcccttaacctgactatgaaagtcccggagtacatagttgatatttcaacaatgtctagggtaagagtcacatgatgagcctggttatgtgctgggtaagacaggagctggagagctatctgagctgggtctggtcatgggtcaggtagtcagggccaagggaactccccaccctcttctgccacaaactggtttgtttcatctactcagtctgtttcatggcaaggcactcagggaagggttgccttgagggacaagactatttatgtattgcctgctttcctggggccctcatccatgctgatgctaagtggatgccttccaaaaggcatgtgggctcttacctctgggttccttaagagtccaagtaaatgtgttttgatcaacgagattttgtgtctttggctttagttaggctgtcacacatacaaatggaaacatttttttttgcacccctccctaccctttatcgaatgagcttgtgatcctaatatggttgatagcagtgtctctctagaggctgaagtcagactgcagtgatgagaccttctccttattccaatgcaaaccttttcctgaggagacaatatacccatatctactcactccagaaaggcagccatgacaggccaaagtacagataccaccaaagtcaccaaagtccaacttggtaatgcagtgagtgtaggggttgttcattaatctgctctaagccccctgggccacaatcccccactcttacatgttggcagtgtctctgtcctacacttctcaggctggggccttctctgtccctggcaatggtgattctcttccttcttcctgtggttggttcccttgcctgagaaatctaaagccctgcctctgtctccttactccagccattggctgctggcaaatttatttaccaattagaaccagcttgggttaagggacgtgtgaattcccgagtaatttgggtacccaattaacacaagcaataaaccaatccacaagaagtgagttttattggggttacttatgggaatataggtgaggggtcccttacaggagcaggagtgactcaaagacagccgcatcaccaaagcccacccccaggactggtgacagctcacaaagctgggaccctggagcaggctgcacagcttgcaggtagctcatcaagttggagagtgtcctttccaggtgcctcaggtggtttaaacctcttccaggaagtctggatgatttatgcctcttccaggctgctggtcaggtctcagagtctgcagcctggcttgtttgagagtcttcacagctcatctttccttctctaacggggactttctgcttttattgctttctctggttgatccctcccacccgtgaatcttgtcagtttcaggaacttcctgaagatcatttattgacttgtttaccttcctgcttgagattccctgcaggatgggtgtttcaatcttagaggaaacaagaacaataatcttgttgtgataaatctccaacccaaataagctctggcaatgaaatcatgactcaattaataggaatacatgctgtgcacctagattgggcagatctaccaataccatcttccacatctatgagacccatccaggccatgtgcttctgctctgcttttcttcttcctccttttctgtgccctctccctctcccattttctcctccttctctcttcccaccttcctctccaccttcccttttatctgcccaatcatcagttctcctttattttacaaattgaggtgggaagcaggtttacaggaaatcacctgagtgctgactcattccttgttcacaaccactcacaagagaattgaccttaaatataattagccccagggctatccacaacaatggggtgtttcaatcttagaggaaacaagaacaataatccccccaaaagagaactaatcccgcatgaaggtacagagaaggtaagcgtagaaagacttcgatgcctgcaaagaaaccagtcctgcttacagcctaagagttaggaagatattggttgtttataccagccaatctgtgggactccgctatggaaatcataggaaactaacacagtgacctaacatagaattgggggggggggtctcagcatcaaatagcagtaatagtaacagtgtcactatttactaagcagatcctgtgagccagggtttgggttacacacatcctcccccacccaagtattatctcatttagtattcatgtaacctccgtgagtcataacctttccccttcccccaatcttctaagacgatgctgaggctcccagagcccaaggctacctaattacaaaactactaactggaggcataggatctagaattgaggtctgactagggccattatatcctggtacaaagaaaatggcttctcgtcttttgggcacagaaagcccctgtgtcagagggcaggggctagcgagcagagggctggttggctttcagtcctccttgcctctttgggcaaacctccactttacaatgacctgctctgtagcacaggtgctcagttgttatattggaccagctgggggttgaggtggctgtggtagcatcaggaggtacacaggggtcatgagtattggggtgcagttgagaaagaggccccgggggctccttgtgacctttaggaaggcattagacctcccttcagccctgttctgctcactggccttagcacacccccaatccctccggtctctcagtcagcaagaaatctagtttgcaggatcacgtgctaggatgacctattgacctttttaccaccatcctcgccgtccctactattaccaccaaaccaaaaagcccaagaaatgcctctctggctgttttatttgactccgactttcagcgtctatgcctttcctcacaattaaagctccatttcgctctaaagtttgcagctttcatgaagagggaaaagggacctttgacaccgtaaatatttaatcaccattgagatgtccaaaagatgagggaatggacggtgcagattggctggctctgagaagcaacaaaagaagccatagtggtggggcagggggtgggacagggggtggggcagggggtgggcaggggtggagcaggggtgggcagggagtggggaacggggtggggcaggggtggagcaggggtcggaggtcggggtaacctaaaacatgccatctttagagcttaaagtggctcacattcctattcactaagtgtgcctgagctatgaaggaagctagatttattaatttatttatctctttaaatattgggcggggtgaactaagatgagatctggaggtgaagaagtctgacgctctcctcctacttctgttttggtaaccatgaagagacacgaaatttctagactatatcgaggtgactgctggagttcagacgtgggggagaaaatgtctaaagaaggaaaaaaaagagctgtctgttcggttttgtgtcttgtttgaaaatacacttcaaacattcgacagtatttcggagatcataactgcctatgcccccaccacctcctgagcccttggccccccgggagtccagattcacttttaagtactttttagctttatgttttaactggaaaaaaaaataatcttgcccagtagggcttccatttgtttctatcaatgggctgaatttagtttaggaaaggctgtggagaaagaatgaaatgtgccttttccccttgccagatctggacgcaccaaccgtttggaaataaagggcatgcaatttgccaagtgttcctgctgaagggccatcccgcatctcttctggatctttctttgaggtaggttgagttgatggttatattcttgcaggaagcaagtgataggaacggaagcattaaaggggtggggtggtggctgaggtatgggcatggtaagggggcaagccaaagctggcatcagtaggaggcgctgcgtgctacaggtacagggtgaggggtgaggggtgctgagtgaaccagggcactgagagaggacaccccgtggagccaatggccttttagaagacctggtcacagctagtatactgattatcaggtagggatctgggggggctaagcaccccaacttcaccttagctctccactccggggtctcccacagggcctcccattggctgaatccaaccagaagccaaactgtccttagatgcagactttcggtatagaacgagactgggaaggcaggagatgataggaagaactgaaggcgacgcagccaggatggataagaagacatacgcagaaaggattgaggaaggaggggtaggttaagttctgcgggtatcctgacctaagaactcatggtgctgtatataggaaatgggcaccacatcccccgccccccgccccccgccccccgcccccgcctctcctctctttcgttttatgtcacatcttagtaaaagatttttgaaaagacaaaatgaagccaggcatggttgcatgtgcccgcaatgctaacactagagaggttaaagcagaagagtttctactttgaggccagcctgggctatacggcaagaggctatcttaaaacgcagggagcagggggattgaaaagatgactgctcttgcagaagaccaaggtttggttcccaaggcctacacagtggctcacaaatgtctgttactccagagccaagggatccagtgccctcttctggcttctggagacactaggcacacacacagtatgtggtatatacacaagcaaatacttataaacgtgaaatgcaatgattttttttccccaaaggactgggagacgtctcaatcaggaaaagtgcttgctatacaagcttggggggtctgactttggatccccatgtaaatactgggcgtgatggtgtatgtcagtaacccctaggccagtgggatggaaaacatgaatccctcgggctcactgatcaattagcctgtccagccaaatcagtgggcttcagattctgtagacgccagtgctgacctctgaccttcatttgcacgcgcacacacgcgcacatccaaccccttgcctgccccctccccccccacacattaaaaaagaggggaaagccaaaagcagcagaaggccaagaaaagtattcagctcttacatttgagatttggtgcgcgagacgcttagcatcagcaatccaatggaaccatcacgccctcaatacttcccaagcatggatgaggacaagaaacgcttccccagtcttccccaggaccacgtgcccagccaccagccagccactgcccatactcagaactcattccaggctacatggcgatatttcgtagggagggcaaggactgtggaataagccgcgtgtgctccgcagagagcgccagattgctcgcccagaagtccagccacttcatcgtcagctgagagaatctccccaccagaatctcgaggaagcggaagcacaagcgactgtggagctatctgcctgttaatcttatcttctgctattcattttaagagtttgagttattattaatatgaaggtctgctttatggcagctcttcttgttgaatgagtttgtgccaagctgcctgccagttatcaagggactcaggggcccagggttacactaacagcgagtccctgagatgtgatgacagagacatgaaaagattttttttttttttgtcctaagagggatcagtattttatgtttaccctcaataaccttttggcgcttcatttcaaaggaacattaagaaaaaaatacaagcaaggatagccacacatttcaaaaataaatctttatttataaaaaaaaatttaattttaatttaaaattaatttaaattaatttaatcaattaatttagttaacttaaaaattaaataactttaattttaattttaagagaccacccaggttgcagaagtgtcctaaagctgaagatgtaattagccgatgagtttgcctacttcctgcagatctagaaaactcgatggtcgctgatgacttaacggtattttgctgtcaatcaagggcggcctcagatccttcaccacaggcagagcaagtgtcggaagaaacttcaccttcctgagtcagggccgtagtctgttttctattgctgtgagaaacaccatgacaaaaagcaagctgagggggaaagggttaatttcatcctgcagcctacagcccatcctgaggagaagagaggtcaggacctgaaacagaggccatagaggaacactgcttactgaactgctctctgcccttgctgatccaactcaggaccctttgcccaagggtggcagcacctgcagtgggctggtccttcccacatcaattaataataataatgataataataataagaataagaataataatggcctgcagatgtgctacagaccagtctgatggcggcaaattctccactgaaattccatcttcccagatgatacttgtctgtgtcaaggtgacaaaaacttaaccagcccagcctgccgcttctgtaacacagcaccgagtgccagggtagtttatgtcctggactctgcagcctctgagaaaaattggcatttaccaccctttccaaaggcccttataatattgaaggctcttacaggccgtaaagaaaggcagcgttgggactttacgcaaagaacagtggttttgaatgtccacctctgttcttttgtctgtaagtgttactcttctgggaagcaatatgtaatccaactctgctgagtcatgacagagaaagctgacaactgaaatgttggaggtgagcccatcacacaatccagccttcttacaggaactaacactgggtactgtcaccaagcatagaaggttactctccatccatccatccatccatccatccatccatccatccaaggccatgttgactgacagcaggacctgatcttacactccctcagctcttgcgcgcgccagactcgaccagcaaggacgctgcaacaggatccttctgcacacgtttattgggagagcttgattgtagaggcgaagagaccccgagcccagaactggtgctgcttttataggcctaggagaggcgtgtcttacaccaggattggttatgcactacgcctcatttgcatgttcctcatctgattggctactctctctctctctgtacctcacagagcctcattatcatacctcatttgcatgtctcacatctgattagttatactctcaaagcctcattaccatgcccgggccaggcactgtctttgcaaaaaactttactgcatatgtacacattggttgtttgtccaaacttatacgtggtggccagcagtagtcagtgccactctgcaacggcacatgtggcttcccacactcagccacaccttgaaaacttgtttaaagtgtggatattcttgaccaatggtccttgtctgtggatggagaaacactgagagggagagagacaagaatgctgggggaggaagggcaggcccacctggccagccagcttagtcagctcaactgcgatcaatgaggtgacggacgtcacagccagatccctcagtcatatctcatgactgcgctgaattcaactgacttctattggctgaactgtgttcaactcatctcttagcatccactcaaactataaaacgatacttcctctagtgtactttcaactatctgttaatctgaagaccaggaaggaagctggctcaattcattttcctgtcagtcaccaaaagggaccagaaactttgataaggttttcagcccgaagaccacatagatatgagcagagttgtggagaggcaaggtggcctgtctgaaattccaggaggccaaaacagatgtgatctctgtggaattgggcaaggtgtcatcgtagctacaaagaaagggtgtgtaaaggatctcttgaccactagaactaacattcttagttgcttctggctcccatcaacccaatcagccctttaaagtatggtcagttaaaaaaaaaaaaaaaaagcaaaacagaagagtgaaatgtgaatgataaccatcttgtgactgtgaccaattgcctactgaacagccgttcttaacgtcccaagtcccagcaggaaaccacagaatctataaagccctgtccagcagaaatgagtctgattgtagatggcttggttaacccagattgcctccagtgcctgagggagtggatattttctcattatggagacttttccagctagcaaaggctgtgcgtacaactgctcagaacccatctgaacggcccgtttccgtggtagcaggtctgtctggaggacagatctgtatcaccttcttttgtttggttttcagccatttgtgttacaagaagttctgaaatgtgtcataagggacacccaacaagatggatgggttcagtcaattggtgagggatgagtgagctatggaccctccgccagatgggtgtgtctaagagaaggcctttaaagaaatacagaccctatgcctaaatatttatatagagttgttcatatttcccacacttttcaaatgtgaatgtgcgtcctgaaggtggagctttagtacaggagaaaattgggaaggggcaaagacgtttgctcaaaatggggcaggaccagtgaagaacctgtttccaggtttcttaatcgcctacatttttcatgcccaaaagttagcatggattcgggtttcttccactatgggagtctgcacgcaattaaacaggaggagagagagaaagcctgcttgccggaatagggcttatggtctcagcaaactaaggagatgcagggaccatcagaaccctttccacaccttgctggtaatttttgtaggatgttgtttcttctttttcaaaatgcagcagcaaagaattgagcagtgagcaacgtgccacaccatggagtatgtttaatccaaatagcttccaagatgctctgtgactgactgtagcaactctgtggggtttagggaaatggcttgcttaccagcgaagtaaggctatctccaaaatggaattgaatgctgcttcttggcccataacactgccacagcccatctgtgagtcagccacagtgactataggagactgatgcatgtatgccctatgttggagaggaattattttgctatttatttatttatttatttatttatttatttatttatttattttcggatttgagtgatgcaaaaaaaattcttaaaatattccaagtggtggagaatgagttgaggggggtattttttttaagcaagtaagccacttgatttgcttcacttaagaggtccatattaacatcaacctagacctacattccctgcttcttttttctctcctctactttctgacactacagaagaggtgacctccagctaacatctgagagcatcggcactgcccatcagcagagagaaacaaggatagccagtccccaaagaggaggttgcacatggaaagatggccacggaccatcttttaaaagccactgctgaaggaatagtgtgtgtgtgtgtgtgtgtgtgtgtgtgtgtgtgtgtgtgtgtgtacagcagagagaatggaagtcaaggcctggctgagctacacccaccccctaatactgtactgtacatctagattagactttcaagcttcttgcccagttccttctcctcccttctgcctttcgaagctcccatctcagcagcgggaggaacagatctaagcagttctgtggaagtgtaaaacctgcagcaggtgacctgtgaggaagctcattcagagcccccttaaaaaacaatacagattcctatccagagcttggctgacttggagctaagaagagaagatcacacagcaaccagttgcagtcctaggaagatctaggaagaatgcagatcatttcttaaggacccatacgggtctttagctccctctccattcaccacagagttgaaggcaccaaggcttgcctctgggaagcccacttctgagaaaacatgagcttgcctgctccccagagcacagtgatctttctgttccagaaattctcggtggcttgcgaggtgggggaaggggggagcaccccagctgacagttgctacctggatgaagtggtggagggagcccctctagaaacataagagagctccggactcttgagatgcgagccctggctgctgagcccaatgtacctttgcctttattctctggggagtgtagtttagtggccacaggtggcactggactagcaagaaacctgtaagaggctccggtgtgaggtgtggattcgaatctctgctgtgctatttgctaacagctgtacccgggcaggttccatagcttctccaagacctttctcaaaagccgagtagggttgatacaagtcactaattaatactgtttgtcccaagcatcaagtgaatcaaaatctacatggtgcatttagaactatgcccagaacggagcaagttctcaataaatgttagcttttgtcactagggttagatagtgagcagaactttctaagtgctatatctgagagcctgggactccgttgccaagggagaccagggagccttttcaaatatgagagctctggcccgagggattgtccacaacgagagtgtggcgcctttctcctacctcactctgaccgagggaaacccacccccggtcacaggggcgtcttggtccccctcagccgcctcccgcttggccccagccccctggcgcatctctcaggcccccctcccgccgctccacacctgtcagccgccctggcagcctcccaggggctcaagccctgggcctccgccgcaacccgttcgaccctgggtcctggctccgcgagcctcgcgtttgcccggggctgctctcgtaaacaaacccgggcgttggagcagccccgcgggctggggagcgcgggagccagctcggtgcgcggttccggcgccgggggaacccggggcgagcaaggggcgatggtggcagccgcggcgtgccgcggcaggcggctcagctttgttatgaatagatgaaagaggccacctacacagtaacccaaattacgagacctccctcctcccgatctcaccgaatcaagaagggaggggagatgggcgtggagggagggcgggcgagaggcggagggcggaggaggaagaggatgaggaaggggccagttgcatcccactttcacaatgggaaagtgaaacgcacaagcgcacccaacctctccagccctccccgcccgcctcgctcccctccgcccgtcccctcccttcccctccgcgcctccccgcgagcgcccgcgccgcacagaggaactctccggcgaaggcggacgaggaggaagcgtctccggagcgcgcagggcttgccgccgcggcacaggctgccggagcgagcccgccgcgcgccgtcctccctgcactccttcccggccgagccgcggggatggggcggccgcgggagcccgagcgcgcgcaggagccgccgccgccgccaccgccgcccgcgtctccgtcgccgcgcgcctgagctgcccgagctgccgcgcgccctgcccgggggcggcccccctagccccatggaggtctcccggaggaagacgccgccgcgccccccgtaccccgccgcaccgttgcccctgatcgcctatctgctggcgctggcagcgcccgcccggggcgcggacgagccggtgtggcgatctgagcaagccatcggagccatcgcggcgagccgggcggacggcgtgttcgtggcgagcggcagctgcctggaccagctggactacagcctgaagaacaggctctctcgcctataccgggaccaagcgggcaactgcacggagcccgtctcgttggcgccccccgcgcggccccggcccgggagcagcttcagcaagctactgctgccctaccgcgagggggcgaccggcctcgaggggctgctgctcaccggctggaccttcgaccggggcgcctgcgaggtgcggcccctgggcaacctgaaccgcagctccctgcgcaacggcaccgaggtggtgtcatgtcacccgcagggttcgacggctggtgtggtgtaccgcgcgagtggcaccgacctctggtacctggcggtggccgccacctatgtgctgccggagccggagaccgcgaaccgctgcaaccccgcagcatccgatcgcgacacggctatcgcgctcaagaacacggaggggcgcagtctggccacgcaggagctgggccgcctgaaactgcgcggtagtgcgggcagcctgcacttcgtggacgcctttctctggaacggcagtgtctacttcccctactatccctacaactacacgagtggcgctgccaccggctggcccagcatggcgcgcatcgcgcagagcacagaggtgctgttccagggccaggctgccctcgactgcgaccacggccaccctgagggccgccgcctactgctttcctccagcctggtggaggctgtggacatctgggccggcgtgttcagcgcggccactggagagggccaggagaggcgctcccccgccaccacggctctctgcctcttcaggatgagtgagatccaggcgcacgccaggagctgcagctgggactttcaagcgactgagcacaactgcgtaagtccagcccccggggttcagatggagtcttgggtgacacttaccaagtctcaggttcactacaccaccgactggccgagattgcaggctactctaaagcacagtctggggtccccaaagggagcgtgtagaaagggtgacggggtagcggggaggattggagggaggttcaaaactctagtggctgcctctcatctttttagtacaaatgcgggcgcttgtttaggactgagctccccccaaccccccgggcccgggctatcctctgttcctaaccgcttctccagaccagagtctcagtggacatgtgggcttgaccctttgagctaacagttactaatgcccttacagaaaaagctatcgaacctaaaagactcgccgccacaccccggcctttgtgccccccccctccacccaccccaccttccaatctctggctgcaacctatgtgatgtggtctgtagagttgtggcctgctccgcactggtaaataaatgctatggtgcaaaagccgctcgcagaccgcccagcctgaaccagcgcgagggggcggggctgtggctagccaagggtggctgtggtctcaacctggtggagagaaccctaggaggcagcttatggtgtacaaagcctcgccctgaaaaggagaaccgggtgtgtgtgtgggggggggggcggtttggaaagtgttggggtgctccaggcagtttctgggctgcagatttccagactagattgcggggctctctggcaccacccttgagctgtgcctaaaccaggcaaaagacacaggtcttcccctcagggctcacagggcagccacagcttgaaatctcgagattgacagttctttgaccggaaaatgaagcgacagttcaagagggtctcgctgatggggattacggaggctttgtgtacttctgcagaggcctttgccctcccaaggcttctggcaagtaactctgcatatggctcctgagagtgaagcctgctgagagcctccttaatcactggacaggattcaaagagcagaaacggagggctacaggagttgctattgttttgctgtaaaatgaatccgaggaggaaggcgggtggtagtggtggggagtcttggagtggagaactgttgcatgtacgtttattgtgtaccagggtgccttgaaacatttcccctaaggtatattgatatgcgggtagaaaggcactcccctcccgccctgcaaagcacaccttaccaaatattagtcttattattcatggagaaaaaaaaaggcttccggtcactcgctccttctctgctagggcaagcacatagccatttaatttcactactagtatacattagcaaatacacaaagagcacaggttgtaccccccccccccaatggtttagccttgctgtaagcatacaacttaatatttaatatcttcctttatatatcttcataatctaatcgctaaagtttggtaaatcactgcctttttttttttacttctctgttgaaagacttgaaacctcccctgcccccccccacgctccacgcgcccccattttactttaagtgttaggcagtttgtctgtggggttaacagcaacagctcagaggcccacagcaggtaactaccacggaagtccaagctttgccatctgacagctgtgtcgatgtgcagagccaaaacatttctcttgactgcatctacctagtgggtactggaggactcggtttccttccaaacccagcatgcatcctgaatacactcaaaagccagtttttggctcaatcaggtgttcctacttgcatcgggatggggaggggcaggattagtctagagctgtttatccttcttcctgagagagagctgccccttggaaatcaagcaagggataaacacaggctgccaaaaatctggaataggggggaaaataaataattaattaaacaggtccctgtacagtgcttcttgctcctgttatttattgagaactcccagggcgcccagagctgtgtgttctgaaagatggggtctctaccctctgagcttgtcatccaagttaaatgatatactcaggttcaaacaatagctttccttggctgcacaggtgggagctgggagtttgccttttctttccttttcttttcttttcttttcttttcttttcttttctctctcttttcatttaagtaaactctctgctcctggaatgcattaaaaagctttaatgggattgcattttaagaacatttgaatgaaaaaaaaataggtggtagttttgatgaaaaaaggccacaatttgctaaccaattaaataggcagataagatacttaactcaacaaatacttgtttgatggcctgcttgtgtgagcctgtgagctatgctggatgccaccgactgtgccagcaaagagacaatagcaggttgcaaccctgtttaatggggtcatgggatcagtgtggcctcggttgtcactcacggagaatgttgtcacggagattgcatttctttttcgggtcttgaatgtgtttttgagaggcgtgctgaattataggtgcctgaaacaggagttggacctgaaacactccatagagggagccccagcagactgcaacagctaacccttcctagcaaacacaggctctcccaccccgattttctttctttccttcttttcatcagcaattcacaggctgccaaggctcaagtgtctagatttgcttgccttcttctatcccctcccttgccagctggtacctgtatggcccatcttccaccaacccatggtaatgatggcactggccaggcagtgtttggtctcttatctcccaactgctcattctcgtccctgctgaggattaatttctgagatgcaacgagtgtgtactcaatgtttcacacacaaggcactcccccctccctctccccctcctcctcctcttccttcttctcctcctatttcttaccttgccaccaaatttcagtgtgtgctttcacagagatcatccgttagctgcagaccccaagcccaccataatggccaatctctgcaggcccactctctgaggcccctgatgggcatcagagtaacaggccctcccgtagagagttttgtgacagcttgacacaagttaaagtcacctgagaggagggaacctccatgtgattggactgtgggcctgcaagcctgtagggcattttctcagtaaaggcttgatggggaaggacccagcctattgtgggcggggctacccctggctgctactcctgggttctataagaatgcaggctgagcaatccagttaagcaacacttggctgtggtgctatggcctctgcatcagctcctgcatccaggttcctgccctgactttcttcagtggtgaacaatgaggtgaaagtgtactttaagcaaacccttcccttagtagcttgcttttgatcatactgtttgaccccagcaaatagaaaccctaactgatatccctccccaaatgatgcttccgtgagtccttcagcaagcccgacaggctggttctgtgaaaagcatcccattttccagattgaagaagctatggtcaataacaacatgaatgccaaagtcttgaagctcaaacctaggcctcctggtatatagctctgtattcttttggccatcctggttcttctggaaatgtcccctgaaagttccctaatttaaaaaggcagaaaatgattgcccttagggcagtggttctcaacctgtgggtcgcgaccctctgggagagaggtgaatgacccgtttgcaggggtcaccatgtcagagagcgtgtctttatagtgcaattcataacagcagcaaaattgcagtaatgaacttagcaatgaaaataattttatgggaaggggcgtgtcacaatatgagaaactattaaaggtcacagcgttaggagggttgagtagcactggtctacaatgtgactttgagagtagagggtaccttctgaagacagtatttgccactaattttatgttgagctttaaaacattacatggcttattttcttcattatgttctacaatgtacctgtgtttagattaatatagaagtgaatgtttttaattatgtgctttagtttatgaagttaatttaactacaccccttctggcacaggaattcccgaaaggtgtgtttgggtctgtgaagatagattatgctagatttgtttggctgcctcagttgggtcctagggttgcctatggattaaatacaactgttagccctctgtagaggctattgtattttctcatagtttggcttatagcattgattctttagttctttctatctgttgcaggtagatatgtacacaccccccctttcttcacactcacacaactctgatgtaattcagttgtcatgcagatatgcaaccacaagatgattgcatagtctccaccaaccacagccaagacgcatgtcactactgtgaggtgatagcccagttctacttggcagtgtgacccgctgacctcaaaatacagtcttcctgtgtttattaccctttcagtttttgttatgattctgtacagccttttttttttttcatctgtagactagatgggcaattttacctttacacacatctgacatgcaaggggtggattaacacaggacaagtgtaatgatggagcccacttagaaagtgggaaaaagcaatcatagctgctatcttctgagcagttatcatggctgggtttgtgcagagcaatttacatgccttattttctgttgattctcagtcaccatatgaggcaaggactttagttattatgatgattatagatgagaaaattgaagcactgagagcttcggttaggttcctagtttgcaaatagcgaaggatttagagcttatgtgatcgggctctaggacctgggtttttagccactgctgtggacagtcagtccccacagacgatgagttttagtgttcagcctatcctgtgtggggcaggcgaggctccaattgataagacaagaccagctgtttgtaggtgatggagcagagaatccttgtttgggaacagagtttttgagtttacatctctcaccatctgaattactgtctggtgccccgtgtggtttctcagccattcatttttttgctaatattgtttttggcatttgggcctgtaaataaccttcatgagtgttacctcttcaagccccagtacctagtgcagtatctgttgtgcagccagacactaagaagtgtctattgaatgaacaagtgacggctcttggaggatcaaattggaaataaatgcactctatacttagcggcaatattgtcctggttctggtcaccatatattcccttactcgtcttccttttcttaatagctgatgtgtttaggattccttctcttcagcttcagggttagatgctatcctatctactctcccggctcttcatagcaatagccagactgcttgtgttacaagtgtgggaggcatctttggccatagaaacctccgtgattggtatttctgtggttgatctaacaacattccaattctagagggaagagctttttgttgtaggtcagtgtttcttaacatgtggtatatggaccaccagtgccaacatcacccagagatttgctagaaatgtaaattcttggacctaacatagaattactaaatcagagactctggaagtggagtaaggctggattcgtataagtttcctacaagattgaaataaacattccatactgctggggagctcctgaatcaggaagacaaacaactcgaaatagctttaggaagaccctgaagctgaccagattcatgaggtccctccctaccagactggaagctgagctacaagactttcagacaaagcaagctacgaagaagactctggaccccaccagctgcctgaaagaggcagagaccagccaagctgtctagaagaggtttagattacctgagggacctagaaaatgaattcttcaacctgttgagctgcctgcaggctatgcagtgccacttcagggtcccagctttgtgagctgtcactcatgctggggtgggctttggtgatgcagctgtctttgagtcatttctgctcctgtaagtgaccccaataaagctcacggttcagcaagttggttcagcaagttggaatttggtgctatcggcactatggtctgtcatgggctgtctccctggggtgagtagacaggtgtgtaacatttctccaggaaaagtcttgtcacacaaaacatcaggcaatttttgggtttccttattttattgtattcatttcctatgtatgggtattttgtctggatgtgtatctgcgtaccatatgccatgcagtggccttgtgggctaaaagacagtgttagggcctttgggactggagttaacaggtggttgtgagctgccatgtgtgtgctggaatcttacctgggccctttagaaggacagacagggatcttaactactaagccatctctccagccttcagtctgtatttttaaacaggcctcaaagtgatttgaattcatgcttcaggaaaagaaagtgaattccattgtgctccaactgtggtgcctgggaaggaggcattgtctcatttttctcccttgtattttatcataaaatgcctactaagtgctcacccaatcctgttactcctattctctccaaacatgtgattgcccccagcagaccctgaggctggattccctcagaggagaatgatagaggagccaaactgaccaacccttgactataatagcatgatttcatctgtaacagtgtgacatcatctataatagtgtgatgtcatctataatagcatgacaccatctcacttccctcaaggtttccttatgacttccttaaatatgtgtaggcacatgaaaactggaaagcctcaaagccaccatggggacaattggttggaatcatgggtctagtttatttaccagagccaggggaacaacaaacatggaccacctaggtctaccatctttctgtctctcactcgaaaacagacttctaagagataatgataaaataaagtatcagtttgatctgatatactcacaaattttcttataatattaccttcatgaaatactaatttgccgatgtcttagggttttactgctatgaatagacaccatgaccaaggcaactcttctaaaagacagcatttaattagagctggcttacaggttcagaggttcagtcccgtatcatcaaggcagacatgatgcaggctgagagttttacatcttcatctgaaggctgctagccgaatattgactttcaggcagctaggatgagggtcttaaagcccacacccacactgacacactccaaggccacacttcctaatagtgccactccccgggccaagtatatatgaaccatcacagccaatgttcatgttaccatagctgattcccccctccccaacccccattacttgaaaatagctttcccctgctccttccataatatatcaggattacagttatctctgtccctctattcctctcagttcctccccacctccccagccacccaggttcaccatctttctgtctctcactcgaaaacagacttctaagagataatgataaaataaagtataataagataaaacaagagctaatgcatcggaataggactaaacaaacagaagaaaaagagcctcctaaaaaggcacaagaaacagatatagatgcagagacacacaccccttcctcattcgccataatcccataaaaacactaactgggagccataataagcaaaggacttacaaggtagacatttacacatatatattatattacatataatatatacatgtgtatatatatccctgccacaatattgtgagatgaacttctaaagatgccattggactcattttctattggccatctagtgctgggcatgtggcctaccgtgaagagtagtttgtttcccgagtaagactgccttggaggaagctaaattttcattttcaagcggttatcagttgaaggtggcttctgggctagagatggggacatgggtacacttctcttttctgctgtaggaccccatgtggcacagagcagtgcaggctctgtgtgtgcatgctgcctccatctctgtgagtctgtgtgtgcatcaatcctggtgatgttccccggagagcctccatcccctctggtccttatactctctctgccttctcttctgcagggtctgagccctgattggggtggggagtgttaatggagactcccgttaaaggcttagagtttcaacagtagctggtttaatgtattagttcctctgctccactattgcttggagtgctttcttcagagaagttagtggttggggaacttggcactatttttagcccaacaaccatgctgttatacagacttcaaaacttttctgtaaagagccaggttgttaacattttactctttgcaaactactcttaatctcttaattatggttaatctcttaatcatagctactgacctcatgttgttctctgaatgaagccagggattggtatataaataagcccacagagctagggccctatgaaatattatggacactgaaacctgaattccttctcatttttatttgtcatgaattattctcacccctccccctaaatttcaaatcatttaaaaacgtaagaactactcttggctcacaggctattcgaatacaggccagatgtggcccactggtagtggcttgccaatggctgctctcctggaaagttggggaggaaagcaagccttctccaaggctgctattccatctagaaggggccatgacagaagggcttggaagccctaagcaagggtgtcatcatcagcagagggagacccagaaggctccagagcaggggcaggacgcttgagcggtgtcttgaagcttagtgaagaaggcagacaagggagtgctggagagcatccagcttgctcgcaagtgggatgttgaatgagtctctgagccacaagccacttaccctggctggggagtgtccagaattgagtgtgcaggaccagatggcgaagggcataatgagacaagcaaaggtgggtaggtttacccggatggtcactttcagactttccaaaccttgctttttaaaataaacacttgcccagaagctccgtgtgttccaaaagaacagcgggtcctctttgacctgctgttccaggaaagagccttgccaagttcaggggtgctaggtgaagcaggttgcaaagtccccagatcccacagcttgccccaccccccacctgcatccatgcgtcatcttcgggatttctgctgagcttggtgggaagaccaagactgaggatttagggagcagcaagaggtttagaagcacacccaaccccagtgtgttctagaaagatcactcacgataaagtgggtaaagcaactgattacaaggacagccattggttcacattggctatttcttgtatttatttatattcaggggccagccgtgtgtgaaagcaccgctctcagcactaaatagggaagataataaacttgtagcaaataggtattttttttttacattaaaacgatagctaaaactttagaagatgccatatagcactgtatccctctaatccttaccatacttttacgaagtgaggcgtttgtattccccaattcgcagatgagaaaacagtgatgcgtgttagggggaggtgggggtgtgggggggtggggaaagttcttctgaagacaaacaagacttcctgagagccacaaccccatccccacccccgctgcgcatgcgcaccatagctgggtgcctactttgccaagaaacctgagggccagtgcaagtgctcatgggaggacaccctggtcagtgtaaagagaaccttgagtgtagttaagggtgtgagggagtgaagaggagagtggcagtgggctgtaggacgaagtcgcagcccttccaacaggaccccctaggctgtgggaagagattagattttagtctcaaagcctgggagagctttttgaagggaagcaggatgattggatttgaatttctaagtaatggctggcctgtggggaatggctggccctgtggaaggaggagagcctgcaggaggctcttacagtattgccgggacagaaatgatgttgcttctagccaagagtgagaagagaggatgcaaatggactgttatttactgtcataagccgacggataatgaggacctgaactgcattccggccatgaacacagaaaggaaggaggggatgagatagctcattaaggaatggtattgaaaagtgttggcagcccgttagaagatgactttaattgctgttgggttttggttgcctttgggacatccagaaagaatgataaaagaggcattgtgacaaattttaggaatttgttcccccaaacttagaatatgttaggctcttttaggctcaaacagccctatttggactgtgtgtgccctgagtggtattttaatctgctctcttttgctataacgaaagacctagatcaagctataaagagtggaagtttatttggctcaggatactggagattgggaagtctattgccatggtcctggcattcagcgagggctttcttgctatatcttcacacgggcaagaaaagtgggtgcagctcaaatacccccttctgtggaggaagccactaatgtcatccttttgtagaaaagatttattttcatttattcatattggtcctttgtctgcatatgtgtctgtgtactttgtgtgtgtgcagtgtctgtggaggccctggagagggcatcagatccctggaacgggggttacagattggcatgagccaccatgtgagtgctaggaattgaacctactacttcttttgcaagagccatctctccagccccaatgccatctaatcttaacagtctccaaaggatcccaccttcaaatatgaatgacatgtggatattggggttctgctactgacagatggactcttggaggacacattcaaatcatagcaaggggagtggcctggctagttcatcccattctttcccatgatgccatcgaacgcacagtgattgaacccttagcaaatgattatacaaactgcaaagaaggctctcctcatctagtggaaaagacagtgataagagggggctgagataaagggttccaagatggggctgtgtttacaggaataataaaagccaggcagtctgaaaggaagggtgtttctggggacttcctgctcagtaaggcagaatttcttgtcagggcctccctacccccagcctggctgaagaagtgtgttatctaacacgccagctgttctccatcattgctcagtggcctcccctgaaggctcctctcttccactgtgaccccttttaagaactggattccaagtactgacccgtgtttctctgaggcagcgggatgggggaaagcctgaagcagctggtaaccacgggtgtcgtcttgtgtcaggctcccatactcagcaatatttcttttcttaaccctatgggagtcttgtgccatgggcctctgatgaaacccatagctcctaagcctatttttaatgcctcaaataatttgggctgccaagtaaaccaattatattgctatacaaagatgttactgtgtagtaatatatcttaacacattgaacagctaggtctagcagcagcaaccactataatctcaaagtagagatgagcttaaatgatcctttgagatattcgcagtaactatgaaatgataagaaagtgtctgatttcttttggtgacaaggcatggcttcatttaatactgctgtggactgaatccaaattaggggaaatgctgcttcacttagagctgaagtaaagatgtacctgcctcctcgcctgctccatggattccttgaattctgggcctgaactaaggatatgagtagaacttccactctgaaccattcattcatttacgtctgagaaaccatagtgtgaaatgtaaagtgtctcattttgtttcaaagcccacttgatttacttgcctatatttgtgagcttactcttatatgtatttatagagcagacatttagccaacaacaagtgaatggatgaatggaaatatggatggatggatggatggatggatggttggatggatggataattgggtaggtgggtgggtgggtagataagtgggtagatgggtagatgcatgggtggatggatggatggatagataagtgggtagatggtggaaaagtgggtagatgggtggatgaacggaaatatggatggatggataagtgggtagatgtgtggatagatggatggatggatgggtggatggagagataagtgggtagatgggtggatggatggttggttgggtgaaaggatggttgggtgagtggtaggtggatggttggatgaatggatagataggtaagcagatagaccaggtaggtgaatgagtgtatgggtggtgggtagaaggatggatgaagaaaattcagagaggagaaatgactatctaaattctctcaactcctaagaaatagagcttgactgtgaatctgatagtttaatctcttgttataactttagagttgaaatttctaattctttctacccctcccagcttcactagtaactttcagagttgaaagaatgttagcgccgggcgtggtggcgcacgcctttaatcccagcactcgggaggcagaggcaggtggatttctgagttcgaggccagcctggactacaaagtgagttccaggacagccaggttacagaaaaccagtctcataaagaatactaaaatgaagacaagcaaggaagaatgtagctatagtcactagttataaacggccctggcattcgacctctaatactcatatgaagtcacgaacaggattacactgtatagcacgggctgtcaactggaaccacgcataagcaggaagtgcctgaagctagaaatcagcagcacgtgctctgaagcgactctaattggtacgcaggagcgcatagagctgacatagagaacacagagaaggagcgcaatgcgggcacaacaatcagggcagggatgcaagaaaggcacaggcgaaggaacaacgacagagacaggacacaaacggaaaagcaagaaaacaaacagaaagaaaccagaaagcaaagcaaacaaaccacaaatgacaataacaacaaaagacaaaagcatggatgaacaggaacacgaaaaagcgaacaacacagatccaaaagaacaccacaaaaaacacggacacaaaagacacacagcacagccagtaacacaacaggacacaaagcagcaaaccacaccaaagcaacgggccagccagaaaaagaaaaaaaaccaaacagcagcagagaccacacaaagaaaagcacacaaagtgacccagccacataaacaaacagaaacaagcacacgcaccaaaaaagacaaaacaagaagaacagaaaaaaaacacaacaacagcaacaacagccaacctaagnnnnnnnnnnnnnnnnnnnnatactcattttttttttaagacagggtttctctgtatagccctggctgtcctggaactcactttgtagaccaggttggcttcgaactcagaaatcctcctgcctctgcctcccaatttttatttttatatcgtattttttgttgttgttgttgtgtgtatttgtaagcattgcatggtgcacatgtgggagccagaagttgttgtgtgtgtatgcatgagcattgcatggtgtatgtgtgggagccagaagttgttgtgtgtgtatgcatgagcattgcatggtgtacgtgtgggagccagaggattacctttagaaatcagttcccttcttccacatgtgggtcctagggattgaacttaggtcctcaggcctatcagcaagtgcttttacccacgaagccattcccctagccctgaattaagttattctaattatgagaagagacagcttctttattttgttcagagcatgtgtcaaatactttgttctgttcttagagtcacattattttattttgttacagttgcggcttgtatgttgctgttatgaggccatgtgtctccatacagcccagtctaagcttaagacttgaaatgtaacccaggtttgcctcaaatccatgatctttctgccttagcctcttggatactgggaaataaatgtgtgcatgaccacaaatggatttagagacacattttaaatagtggtacactcagttactaggctatctatggatcagaagctgtctcttgtgagttattgataagctgtggatatgagattaggtttagatacctggtatgagaatgtggggaatagtaacttactatcgctccccaacgcagaccaagacccactgtttacaagggacaaatcttgcctcggttgaagaactctgtaatgattaaacctacttagcagtgttccttacttgcctgatgagatattgattgaaagtatccaaacattgatctatgtgtttatttattcattcaataaacacttatcgacatcttactacaagctggatgctgaggtggaggctgctctcaaactagagaataagacaaactgtggtagagctcagagtcttctgggagatagacaataagtacaatttttaaaacaattataggtattctgaaggaaatgagctgactgctatgattcagagtaagaaccgggaatgaggagagacgagttcctgggttgctgaagagttagcttaaaatctgaaatatccaaaagagtcggtccacagggaactggaggagaagcagcaaagaaatagcgtgtggcgagacctgaggtggaaagatggcaatgcatccctgaaagaaagctgctgtaggagcaaaagcagcttaaaggaggagagctaagggatgtctctgcagtcatcaggggaccagcacaggtggggtctcaggtctctgggtataattctgagtgtaatgggcaacattgaagactgttgaggaaggtctaacttgtcttaaagaccaccttgactgcaggatggaggacaagttgtggttttaagtgagagaacagttgatcaggagggaggtgctgggagctcagcctgggtagatgccatggagaggaagaggaggatgggctggagaatgctggaaaatctggcttggataacagagccagtcatgggagcagaatctctgggattgactggtggtcctgttgactgtgttgagttagtgttgaggaacagagtaacaagagagaaagcctagacagcatctttcaggaactctgaagccgtgcacggatggggtggttctcatgacacaatgacatcagtgtgtttggagagattggggaaggtacttggcacttgtcggcagcatgtagggggcacttctggcatcttgtggagagtagaccaagatggcccaagagacatacctcaagatggaaatgactccactcagaacaccattagctttctcgtggacagattttggtggactacctccttcggtttaagaggctggaggatcccgtttccatgctgcctaccattcatagcttttggggaatgatttaagttgtcttttcaaaaacatttagctgaaattacctagagggaagaaaagagatggtatgaaccaggaacataaaacccgaaggaggaagtagaatggtcttggagagggggctttagcagcaggtaggatgaggaagtggacgactcagggcaggaatagaaggacatgtgaagtctgtgcctctttcaagtgtcttctgcaggggagctatcccctgagacattgtcacacagctcttccctcagcccccttctgcatcagcctcctgcacaccttgggttcctcccatgactctgaatccctatgaaaatgtccccttggatggccccatacatgtcataaacttagctggaacccagtcgatgctgtctgttccagaagaactggaagaacgtgacaacctgagcagctaatgaagtcccactctaacttgagtaaaaggtttgtttggtttgtttggtttgttttgtttccagttctttagcttgatgacgatgacttcctaattattgtcatgcacacgatgtcacttgagtctcgcggcagtgctggagctaggcggggcacgaggtagggatgtgtccattgtacaatgtggtgacccgaagaaacccacttgcccaaatcaagcagactgtcagagactagaaattggaattcagagtcttactaaccgggtccctgatgaatcacaaatagcaaaggatggagaccctgtttgaaaacaagagtaacccaagggaacagaatacaagatgaactgcccaagagggcattttataaacccgagaaattaataagcaccagctgccattcattcgcctttgtcttataaggaaaaaccaacctcaggagtcttcttagcactgggtttgagtaaaaagctcaactctctctctctctctctctctctctctctctctctctctctctctctttctctctctctctctctctctctctctctcggtccccagcactggaggcccagctttgtggatatttcctgtgtgccttactgcaggaacttcattgggtagaccttgtatggcatctttggtcacctaggaggcaaagctgaggctgccttttcatgtcctagaaatcatgactggtgctccctttggacttgtgcagtgaacagtgtggaccacagctctggtgatcactgcagacaaaaatagtatgacatggccatcaaactactagatatgctcactactccttatgtactggcctgcatgcatgcacacacacgggaacatgtccatcagcccatggcgtgttccccaccctcgatggcctggtcccaggttgccatgttgggtccagacctctcagtctaatcatcatttgagagaagggtgctttttcctctggctgagagaagtttcccctcagtgagagctaaactgtaagcgtgcgagtggttatggtgagacgcggcaggaaggagaagtggagggacagctctgagggaaccgggaaaacccagagggagatggggcttagagctgaatcgagattggattttgtcatgaaagacagaagtggcaaaagcatcattatgaggcattaaccttgttacacacagacgaacaagcagaggcagggactcggagagaaattacacataataaactaggcagaatgggctgagagcaacattagcaattacaccctaagggaagagaagggcaaaatagaagacaggccagaggcaggaaggagtgagaataatttctggacacagggggctgcttgcacgatttcccctcttttctgcttgactccctaggtattaagttcccgtttgtgaggaggtttctctgaggccctctttcttctgtttttccctttgctaaaatgagagtaagaaaagcattctgagggttcctttctccattcacagggacctgtccatttctctgtgtttttagcacaaaagaatccatttccattcatccagaccggtcctgggagcttgctggggggtctaagcctctgccctcctcttttctcccaggctcataattagccacagagttctgactactgcgaagggcctcttggctggcccactgctagatccaacaagttatggttgttattccttaaacagtgattttcaggaaatcccatggcagctactgtggttaacttagtgaaaactctgtccccaagaacctagggcccattgtgtttctcctgcgctaatctccatgagctggttttcgtcctccatcttggatttagtggaagcaaaatgtcttcctttttctacgtgcatatcttatgcctcttgtaactgtatcccaagggagggcatgagaaagatccaacagctcacctgcagagttttatcagtgaggaaactatatagccaggaacccttccagggagctccttaagtctcactgagtagccctgggaatggacagccatagttctctgtgagataggaggacaaatgcctggtaatggtgactggaatcaccatttggttggaccaattatggcttctgtctagcttgggttattgtgatctgaaggaaattttagaagaacagctagctgtcttgggtgtggtagcaactgtttgcctttttaaataaggtagtggccacaagtacagcttacttgtgtgtaactgtgtgtcaggcattttaccaaacgaattcatttagtccttataagaacttaacaactgtgaagaagaaatgttattaccaacccttccacgatatagagcagtagttctcaaccttcctaatgctatgacccttttattacactgcttcatgtactggtgactgccaaccacaaaagtatttagttggtacttcataactgtaattctgctactcttatgaatcgtaaaatatctgatatatgattccccatccccacccctgttgagaaccacttgttatagggctgaaacaatacatttaaagtcccttagctagacaataacagggcccaggctcaacacaggtattgggctctttgtctggaaaggtggtaagtacacaccgtatagcaccctgagaatatccatgtgctaggtagtattactcatatgatcacttaaaaccacctccctgatgctgcagccctttaatacagctccttatgttgtggtgacccctctaccccaaccataaaattattttcactgctactccataactatagttttgctaatcttatgaatcataatgtaaatatctgtgctggaaagctgtgtggtcttaggtgacccccataaaagggttgtttgacccccaaagggttcccaactatcaggttgagaaccagggacttagagtgtcatcttcttaagtagcccaacagtcaggcacattggccttatcagacagtagagaaagccaactcaactcagattcagtaagtcaccagggttatccggtgagcgagaattgagttcaaaggcagagtagacccgggtggtttgtcccatcccaccagtctctcaagtaatacaataatgaatgattgcaattcgtagctgtgctattagtctcaggcttatttgaaaactacatcttttgggaagaagtcagaagtcaaaggagaatgggaatggttttcctcctgttcctgtccagcttctggccagcctatgtgacttggggagagtctttggcaagcaggctatctcccccagcctcagccaaagcctacccaggccagcactgtccatggataactggaacagaaacggctatttggttcctaccgcagaccagacctaagactccagtcctactcggtacttgtgggtaatcaacaatccacagcccttattccttttgtgttgataagaggtgtagtcctctattaagaaatatgatagtgtgagagcattctcaaagctcagaaatgatgccctaaatctctgacttcgcttctctatgatgctcaaataaacaataaataataaacacaataaatgatcttacatttggacaattctggttttattttaagccaggatgtgtgatgtgtctgtggggtggggttttttgttttgtttttcttttttcctttttttttttttttttggtttaaaggtcatccaactttttttctgctcatgatcacgaggcttccttatctaaacagaggtctattgttccagtcctcagacctacagagatcttttttcctcaacttcacttttaacaggataactgctcaacctccccaatggcaagagacgtaaggtcttttcacaggaaaacataaatgtctaatgggcattccagaagtctccttcaaagggagtttactatatagcattttatgcaaatgagacactctcttaggctgtggcattccttccttgaaacaagccggggtatcggagggagctactctcctcacttaccatttcctcacaggacaacatcaacaaagaaatatcgatggcgcttttaaagccttcagaaatcaatttagtccatgaatctatttagtttagatgttaatgaaacttggtggctttaaaaataatgaatatttaataagacataaattgaaagacataaacactgttggcaataatataatgaagttaataagtcttggacccccatgtccatctccctgctccccaaatggccccatctcaggagtctctatgatgttcactgaagtttgctgcctctcatattggccgcaatttaaatgcgcctttgaaaaccgtaatacggttgggaatcgggctgtggcagataaagtgagctatcacactgtgttcagtagctgcagtgggcaacggctctctcttagctccctatcttccagagatttgtgtaacaaactcagcttcctgtcttggaggcaggaagcagcttggggcccttcattccttttaaacaaaaaagggaaagatatcatggttggtactctctgggcccttggtttaaggaggggctttatttattgagcaggagcaagcatgtgattccacgtgctcaaaacctcatacaatttcaacgcatttgggttgagggtttgggcttttcacttccgctttaacagcctcagctcagggcccagttctaccctgttcctcattagctgggtcactacatattatcaccatccacagtcccatctgccttctgccctttttattcatctttgggcttcgccctgcactttgtctatttagaatctctcctctctggctctctgctgccccactgataggaccctgctgcctaataggatagtccgaggtcactcttgggacatgttcatgtttctggtcacagaagccaatatctaactaaaatgaactacagcggagtcctgcaaacaggacagttacctccccagccccagttcagaaatggcttctcttccggtgataatgcaaactctgtgtcttagagcaaacggggttgtgccaggcacgtgacatggatggctagctcggtgctggcaatcagaacatgtgaatatacagttaagcacgacgctctccgtggctcgggcaagccaggagagttggcagatgaggccagtgaaggctgtccctaaggatcccgttgaagagaatgtatctggggctcagaaatgcagacttcctaagggtttgcgagtggtacttcatcaatataaagagaaacactgatgttagaaaatgatcatttttctcctccttatttgttcctttctgtgtagaaagaaggggatcggcctgaacgggtccagccaattgcatcgtctacactgatccactctgacctgacgtctgtttatggcaccgtggtgatgaacaggactgttctgttcttggggaccggagatggccagttactgaaggtcggtttctctgtgcttcttcgatcagatgtccagttttcataagctcctcttagtacctgcctacctattgtaaacttcccctcaggctccaccgagtcctacacaagactctacctaacatggctctgcttgttctgaaaaagcaacattgtagcaatctgtacacagacccaagcaacattgtagcaatctgtacgcagaccctccgctcctgccacctcacactgtcaccctgcaatgaggcactagccgcctgctgtctgtataggaggcacaccgtgcccccttccttactcacggctgctgggtgtgatgaatgctgctccagcccctaccccatccctgactcaccttcctgagacgtttaacctttcagttctcacaaatcaccttatttctcacaacttcaaagagacacgagattagaggcttgaaaagaaaaagaagaagaagaagaaacaggtgtgccctccttccagcccctgtgccacccacagagggggtttgttttctgcccctgtacctgtacacaccagggagaggttaaagatctgaaattcttccagactcccctggcctttcatctcataggactgttttcccccatggtatagatgaaccttggtcaagctgagatttttttttttaattcacccagagggggaggggcagcggggaggaggaggaggagaaagtcaaatcagaaccaccaaggggttcatctgaaattactcagcggtcctcttgtcagcatccttagcaagcatgaatggcgtgtctcccgtggcctccagcaacagccgtggctaggaaccgcagtgtctgtcaccctagactggtgacactgcttgaccccctctctcagcagccactcagttgaccctcagctcagattcttaattgaatactggcagccctgtttgccaccccccccacacacacaccccgcagccgtcgcccctcttcagctagctgtgcctttaaggcggatcatttagcctctcttagcctccatttctctaaatgtaaaatgagattatactaggcaagacaggaaaaaaaaaaccaccccaaccctttcctcatctgatggctttgtacccacagactctctccagcttagcttgtgagccgctatgtggtcctgtgtccacacttgatcatacccacccctagccggaaatggcttcccccttctttctattctttactgagttctctaattggctccagtcctgccttctctctgacggtgtccaagcccccagaagtgtcttgctctcctcgtctcctgagctactcaccaccagcacccttccttgactttatattgatgtcttgccttgatacctagcctctgtggtccatgtttgtcctaccttgagtctaagcttcctgtaaagggcgccatgaattccctcagcctgacacaatgccgagttctgggtaggcatttgattgagtctgtttcctttggaggaaacccagtaacatatgggagggaatttgtttgtatacacattctttttaaatatacattgatcatctttctccttgagctagtttcatttcctggggaaaggagaggtagatagagaaatacccaccaatctttgcacacttgacacacaggaatgcctgtggacatactagcctggtcaggccaaggaggcccattaaccctgcagaggaagtttctatccgtcttgcctgggtctccttaccaattatctcttcagatttgggatgtttttgacaagtgttttgacaagaacactgtttccccaagctgagcctaccagactgtcacacgaagaattggaggtgaaggaacacttgcctataaatagtcccccatgggatggcttggcttcccttgtcctgtggattcagatcagccattcgtgtgtgcagctgtccgagtttcagtcttgctagaagccggggggtgggcccaagctgcagcttcacgctgttaatagaaaggtggttgcgattaagtcttgccgtcctcatggtctgtatggggtaccactttgagacccccatctggtctcattttcagggttcaattaacaagggtagacagatgtttggtttcagtttcatgagtttacatttctacagtgtttcctgcatgttaaataatccagctctctcaccagccccattttacagatggaaacatggaggcctagcattgttgagtgattggacaaagttacaaatgggcagtgcagggatttgaacttggaacaatgtcagaggctggattcataactctctgctgtggggacattgcagtccgtgcctcagcttccaggctcctcctttgggggctcttagccaggggatggtgtgttgggagggagccagccagccagccagccagccgaccctctgattgagggaacccctgacctgacccaggattaaccactccccatacttggtctctaatagttccctcccacagcaggaggctctgaggggtgaggctgtctccctcccaccctactctctagggacagtaggtaattcccttcatactgtctcttgtgtccatgtgcaaattcttggatatagcttttgaaatgacttggagatggccccaacactccccccaacacccccaaatagaatcatgcccagatgatccccagatctttttattccaaagaacctcccattcctcttgccacacttctccccagaaccgttagggaagatgaacactgagagacacaagcttggcttctaagcctcttcctggaggtattaatggacaccagagaagcgaaccccgacctgctgccgacagcgggaggaggaggaaaaaaagggctcgcatcacccacagcctgactcatcagtttcgcagtgatcaagaggcgaaggcattttgacatgtgccaggcaccgtagtatatgcctggctggatctgaggcaggcaaccggcagccggttgctgtttttatcaccaccagtaagaacctgacttcttccgtctctgcaaacctcatggagttttaatataattttggtgccattttaaacctcaggctatttaaataatatttttttccctgcttgtgaaagaactataagctcacgtagagagttgcagggtagcgggggataagaggaaggcaaaataaaaatgatctttaattgcgtcatgtagaggcaaccactgtcagcattttagattctttttttacatagttgaggtcagactgtatccagttttgaatcctcctttccttcagctaatgagggaagaggcttatattcaaatgctgctgcaaaccctttgtaaacagtatttttaaatagctctatcatggtgttatatgggaacacaattttgaacttgagccgagatactggatcactctataaaaagtctttaaacacacacacacacacacacacacacacacacacacacacacacccgttccaaagaagacagtactgtctccaaaggtaagatttcaatgatgagccatgagaaacctagagattttgtggttgctagcacccttattaccccacttctgcctttgtaaaatggtagggaaggggaggaaatgtggagctcaaaggtcctgccctaccaacttctccgcaggtgttttgggatcctgtagcaagtcgcaccccacctcccccatcatctttccattttgccccctttctgaatatggttctatgtgatcattttttttaaagttgtcagtatctctactgaaatcagctgaaagtgtgccgactctgaactcagtgtttgaaaatccacatggcacgtgtcacatggggtataccatcctaggaacacatgccatatcgcttctccaactgtggtggagtctgtcgtgtgctttggactcctttgagctgactctgttgcctgtaagaatattctctcctaatctcaagggcaaactgggagatttttgagcgtttccaggtggtaaaaaattaagtaataaaggaatatgcatgaaatgtgaaatttgtaactttatgcatgcccgttaaccttccttataagcataaaagataaataaggagggagcaggtaaggactaataaaagccggcatttctgagctcttactatgcacctgccgtctgaaccagcatcagcatgggttaattcatttaatccgtatgagtcaatactatgaccatccccactttatcaatgagaaatcccggggctttagggcattaggcagctggttcaaggtgatttgaactgaaacaatctgtccccagagcctgggcttttctcctctggcaaaactgcatttacagtttaaatgtaatctctggagcttgacagagtgcctgggatgagctgtggacttttctgcctggtgtgagggcaactgggcaggtctcgagacaccagtgtctgaggtttcctgagaaggggccttggtttatgtggtttttactttgttcctacttggggacagttttgagcagctgagggctcagcccctcttcttgggactgcaagtggctcgtggggacctctgtacagccattagagctcaggttttcccatgtaggctccttttgaagaacagtaaacattctgaattctgagctagcagtgtttgaatggccccctgataggagagccagggtttcccaatttccttgttgctgagggagtgtgctggcccaggaagctatgtcatgcatgcatgcagcagaagggtattgctcgcagggctccatcagccctggcagactgtattgttaggactcgactccatgaagcaaagcaagtcagttcgagagcttgcttccagaactcaaaaacccacaagttcctgaagaatctctctagaccgctggctattaaggtggtcaagtgaatggaagagagagttttcaaataaaatattttactgtacttccacaaaatgtaaaagtggggggggggaaggacccaagacaggcacagagctggtggggagcgctgaacaaattaatgggccaaatagaaaccacaggaagtgccaggcttagaaaagggctccgtggttggctgtgtagaatgtcatatgaaacttatttcagactcactccattacaccccagcttgtgagtctggggactccctgactcggcacagttagctccaagtaacatgcaggtctagaactcagaattgagccccgtgcttctctaactgactatcatgaagagtagacagagcttcccctccttcttcctgttttctctttagtattcctaactccaaaggcccactacacttttttttttttaaagattcttttgagtcagggtttctctatatagctctggctgtcctggaactcacttttgtagaccaggctggcctcaaactcagaaatctacctgcctctgcctcccgaatgctgggattaaaggcgtgcgccaccacgcctggaccactacacgctgttagataactgttttgtgtgcttaggggtgaggattaagtctccttcccagtgtttctcaaaagccattttgttcgaaagaataaacaggacaattggctcatttacccttctgctgaccagcttcagagaaggagaaatgggaaatgaaatgtcttaaaacaccttagccttgtgagcacggcttctctatctcaggccatcggaaaggaacaaagaagttaagtgtttcacttggtttcttttcttcttcatcttcctcactgtggagcatggagctgtcctgtgactctgcggtggaaatctccactcgcttaattttagctgcacggctgggaggttttcgtatgcagcagaaatctcagggctagttaatagcctaccacgaggtttcaggaagatgacaacagaaacaagatgttgacatgaactgaaattctccatcagggaaaatttcttttctacaaaggccttggttggaagaatgtgaagagctttacaaaatcttgaatgcttaatagagtagcatttgacttaataaataaatatgttttctgaagcctcttctgtaactattctggttatttgggtacaaaggtgagtcaaaagagcggggtgtgctaatcctagcacttgggaggcagaggcaggaggagctctgtgagttgaaggtcagcttcgtgtatgtagtgagttccaggccaaccagggtcacatagtgactcagctatctcataatacttacaaaagtgagccaaagagacaagccttgccttcctgctgagtgtgtgcgtgcgtgtgtgtaagtgagtgtgtgtgtgtgtgtgtgtgtgtgtgtgtgtgtgtgtgtgtggtgtgggtgggcagagagatcagaggcagaaaacaagtaaattaatcatccaatggtaaagccatttagagagtaattaaagtactgagaacaccagagggatggagaaagaaggacaatggccacaggagagaggcaggcaatcagggagagctgctcggaggaggtgtggctggatgatgaggcatatgtaggaatatacacagaggaggcacagagtgacttcagattagatctatattaaggtcgtatgctgagagcaacaaataaaaacctgcaccatggctgagcagtgtgtcgtgtgaattggacgaggtttcgcttatgcaaaattccacccattttgggtagctgtgactcatggttctttcctgcactcctcctctgatcccattctttttccatagctgcccagccaaactggcccaaggagcaatgtctcctttgctttagcctcggcggcttttttttttttcctgcatggatatcctcatgaggtctgtgactgaaagtccaagaggtcccctgtgcccctggtctgggggcctgggggaagtgagcagaacctatgctggccattgagagatgctactggggaccgcagaagccaacgtccctgacgctgactgtagtgcgtttgtgatctttggaataaaagttcaaccttcccattgttttcctctccagcacgcagaggtcattgtttgcatcatctgtttcacccgcccaccttcaaagattaaagaacttaaatttaagttctacgtatgaatctcactatgtagccctggttgacctgtagactaggctagactcaaacctccagcagatctacctgcctctgcatgcctggtttcgggaattaatgttgtgtgccaccgtgcttgaccttatgtctgtatattttaagataatacacggacattgtttaaaaccctaaactactgagaagtacagagtgaaatctacccattcccaacttcccattccaggttcaactaatgaaagaagtgtcactggtagctttctagtcagagtatacacacacacacacacacacacacacacacacacacacacacacatacacacacacacacacacacacacatacacacacacacatacacacacatacacacacacatacacacacacatacacacacacatacacacacacacacacacacatacacacacacatatacaggcaggcaagcaagcaagaggggatgtatttttcccctctcctatttttactgaacttgtgtatagctgggcagtggtggcgcacacctatagtcccagcacttgggaggcagaggcaggcggatttctgagtttgaggccagcctggtctatagagtgagttctaggacagccagggctacaaagaaaccctgtcttgaaaacgtgtgtgtgtgtgtgtgtgtgtgtgtgtgtgtgtgtgtgttgtgtttatatgaacgtatatttactataacatgttaaaatacttgccttctaactattctgatggctaaagagtactctactttttacactactgtttaggtaaccctgtttgtttttacactattgtttacagactcctattatttacatagttccctactgttgatatttagttagctctagacatttacttataacaggatgttacaatgaatatatgtgaatatgtctgtgtgtgtgcccacacgtgcacacacacacacacacacacacacacacacacacacacacacagaaaggcttctgggcccaagaatacatgctttataattttcatgacaaattctagatagtctcccagatggatcctagttccagcatccctgtcacatacccattcacacccatcatctacggtgagcacgccgtgcccaggaactcgtttaggaaattgttggtaggtcctggcaaggcatacctagaaacagcaagtgtttttgagaaagaaaggcttccctgcctcatttggattgctgaaggatgctggtgcctcctcttcaagatgtcaagtaaacagatccttggcatagccctcctgtcttcccagtggctgcaagcgtcgatggcgcaagaccctgtaacagctgcgagacagctcccgacgcaccaaccacggatgagggatggtgtttttctaaattattttatgtctcttcttattttaaagcaaatttcagacactatgacatttaccccaagatatttcattatgcctctctgagaaattattatcgtgttcccaactgtgactataatgtcattatcacagttaacaaaattatctgtaattcctcaggattatctactgaatatagctgaaatttcacaattgattaaaaatacacttaaaattatttggttcaaatcgatgtctggggcacacttgggtgcctctggcctaaggcacccctcccacttaattttctctctcccactggcttcctgaaaagccaggttctagggcctgcagtggctctcatgtggatttgcctgtttgtttcctgtgtcatttaagcttgctctgtgacttttgcttccgaagctccttggaagttagcactggagatttgactgggttcattcaggttgaaggtcagagttccgaatgtggtacagagagcttccctgaggaggaagcctgacaggatgacttcctgaaataggacggaagcagcaacctttcttgggccttacttgagaatcctgtcagttttttttttttccgttgtttaacttcccccctccctttccagaagcccagaagctgtttaattctgagctaagtcatagtgtaacttatgagttggtcatgagttagcaagtttgccacttactggctcggtgcctgcttgcccccttgggtccaggcacgtaactcttttctatagggccaccttgctcagtggaacatttctgtgctgatagaagaagtattctatgccagcacttgacagtacagcagcactggctgcgggtgagctgtgagtgcttcaggtatggctagcaggagtgagaaactggactttcaatggaatctaaatagccttgtgtggttagtggctaccatcttggaaagcacagctctagagtcattttcaaatgagccacagatctttcctaccaccctgagacctaactgctgctattttaaaagtttttcccccctttgattttggtttttcgagaagggggtgggtaggtgaggggtaagaagtgattctctgtgtagccctggttgtcctggaactcactgtgtagactaggctggcctcaaactcacagagatcttctttcttgcctctgcctagcaagtgctgggattaaaggtgtgtgccaccactgcctggctttaaaggggattttttaaaagtcatatttaatatatggggtcagtgagattgacttttactgagtgtctgcagaatttgctgagtagtcttgtaagattaggtgccccaaatccactagcgattgattaagcagatgatggtgtgaagttacagggcaaaggcagtgcctggaggggatgggtacagggagctgcctcctgtgctgaactgataaagagctggtaatgaaacagcaaatgccaaggtgccaggagggtatgctggggtagggatacaactgctcagtggacttgtgagcattgctttgtccaaaaagaatcttgggagtctttttttttctttttgagacacatatactatatgactaatgtccaccatagtagacatgtgggtattgggccagtgagatggctcaggagttaagggggcttgctgccaagcctgacaacacgagttcaattcctgggacccacagagcggaaggggagaaccatcacttgcaagttgtcctttgacctccttactcacatacccataccctcaccctgtcccccagagcacagaaaaataataaaaaacttcaggttaacagaacctacacagtaaggtattattagtcccagtttatagatgaggaaagggaagtctggacggttgagaataagttcaaagtgatacagtattgccaggtctaaaccaggcccctacctcaaatctccaagatgacagtagctgctcatctgacctgcgcacatggacccccgcctcttggtcttggcactcatctgtccaaggccccaatggcttcttgtctccctccagagtagacagcaggatccacacaggctgtagaacctgtgcccaccccatgatcactcactccgctgctcactgactcttttctgccttgttctgctctttcctcatcggcctcctcgtacttcaggtactctggactaactgggactctttaaacaaaacaaaacataaaaacccaaacatgtttgggctgaccagatgactcagtggttaagagccctgactactcttccagaggatgtgggttcaactcccagcaaccatatggtggctcacaaccatctgcaactgtagcctcaagggatccaatacccacttctggattcagggagcacaaagtatgcctatgatgcccagacatccatgcaaaaaagacccatacacataaataaattgaagcaagcaaacaaaaacccgtacaggaacctaaatgactgttgtaggcgtcactctctataaaagacccaccgtgagcctggattctccctttccaccttagcatctctgtaacggtcaggtgtaccatataattgttagtccacatttatagatgaggccactgtcgacccactccaaccccatgcatgttaagttcacgagggtgagatttctttcccaatctgttccctgcccccactctaccccatagcccaacactgtgttctctgccattttcctgagcaccaaacagtatacaggcgatcagtaaatgtttgttgaccgacgatgaatgacactcgggtgtctaattgccaaacctcagaatactgattcacacctgcatctattttctatgtaaacacacacacacacttctatccctgtgaacttgtcggggttgctttagaatgcatggctacgtgaaaccacagactaagccatgcaaatatatgttgaacagatactgcctttagcttcaaggtcactcttggagtgatcctaagaaagctgttaacttgcagtttctgatagagccaagctaagaacttgtggaaacaagcttctgcctgtaagaatactgcctccaaattgaagtgtggctatctgtgagttttttgatgactttgtctcttggccaaaaggatacactgtacttggcattgtcagccttgtggaagatggagttatgattaagaaatatattctctcacccagtctactgtctgcccccaccccatgcagtgtgtgtgtgtgtgtgtgtgtgtgtgtgtgtgtgtgtataccagcgacacacatatgaagcaagaaatgttacctatttatagaattttattattggctgaatttccaatggagagtttttcagagttggggtgggggtggggttgcttccaggtatcacgtgactaggaaaggatatggccttaggattaatctataggtcttactattctgatcttcagaatacttaatagaaattatatttctttttgtttttttaaatgaaggttgttcttggtgagaatttgacttcaaactgtccagaggttatttatgaaattaaagaagaaacgcctgtgttctacaagctcgttcctcatcccatgaagaacatctacatctacctaacagctgggaaggaggtaggtgaagctgctgcttactgctcctgacttatgaataggaattatctcactgatgtcattatacagtggcaaagcttttactttgagccgccaggtttaaacagcgctgcgggctttgagaagacctatggtgggccaagagagtagaattaaaacccgtagtgactgtcatcagtaactaagcaagaagtattacccatttagacaattttattattggctatatttccagggccagatttttcagaggggggtgtacttgcaaatgggcgcataatcagcagagtaactgaatttacacgtttattgtgtgggcactgagtgcttagctgcatttatgagtgtgcccaatgggactggctttggaacttggggttaataccaggccaccatctcatacacattcatgaaccaggaaatgtatatcactcatccccaccccgcaaactctttaatttatcgggatgtttgtctttttcttgtctctgcttactgaagtgaaaacaatatcttttcaacattttatctctaaaaggaaactatttttttttttttttactgaattcttacaatatggaagtcattgtgttttgtagggtctgtatgtgtactgggttgtgtgtgtgtgtgtgtgtggacacatgcatgtaataaagaatactaatgaaatatgttaatgaaattattactccacttatatatatgagcagtctaagactgggaaaggcaagcagttccaggagatatgtgtgtatatatctgacgtgtatatctacatgtagatacagatataacatatctctatgtattgtctttaacagggctagaactcaaactcggtcctgattctagaacccatgctttatcctggcctggtagttttgatccatgaccctctgaacacactaagtaagaagaaggcattcgggacttaaataattacacaatggatgtcacaggggcccttaccctccccccatttgtcacttcttcttttttagccactctcaggaggagagcaatgactgtcctacgtgtgcttgcctttttgagtcacaggctaggggtgacagtatcaagtattcttagaaaggccacattgctcttttcagtttggaaagttggatatatccagtgatcccattaagatggtctcacatctgactctcccttagcctttttcggcttacaccacggccttctgcgccggtctactcagtcaaacactgttatgtctcttccctgggatcccagatttgaaagacttttgtctattcaacaaactgtgtttatgaagtaaccattcccattcccaggctttatttatcaaggacatctcaaaactgccagccagagtactgactgtgctaccacgcaacgctgataaaattccaaccccctccccccaccaaagcaaagctcctggaagtctggcttagtctgtgcatatttttttccattttgcttttggagatactgcaaagcgctcataaattcccatccctatgcacaaagatacttgtaggactcagaaacccagtgctgtgggcgctgtagtaggctgtagaccttgtactgtgtgctgaagacccagtgctgtgtgctgaagacctggtgctgtgggttgtagaccttgtgctgtgggctgaagacccggtgctgtgtgcttataaagacacagtgctgtgggctgtagaccactgtgaaagcaccaatagttcatagatcttcacttcctagaaagtaaagacttccagtccctaatgacttacagcctgaagaccttagagacagttttcaagggggtggggagggtgtcaaaacgtgtcgtctctatattcttctctttagtataattgcaaaaggttctattgcttagtcaactgtggtaatcctagaacctagcaggcagaggcaggaggaagacaaaaaaaaaaaaaagcttgggctagatagggagaccctgtctccagaaaaagactgaagcaaaattctgctacttggctgtgattgtgcaagtgtgatcacccaagagtccaaatgcaaggagagcccttcctagactctaggaagttattattaattttaaaaagccatagaaaaaatctataaagtggtattaatacgtgcccactaaacataatcatatgcagatatatgtactgatgagaaataggttcacagtatattcattagagagcaggtctaatgtaataattatagtatcttatcttttacgtagagttatgtgggtgcttaaatatgttaaatttatagacagtataatttgaagaatgttctagagacttgtattctcctgaaggttcttagcaagagaacctcctttggtccattgttattaatgtctctacagtattacggtgctggacagattcaaaggctcgcaagtctgtgctaaggaaacttactgttcacgtttgctggaccacagcaccattttctcccataacagcaatagcgagtgcttatgacacaaattatttagtatgcttctgagactatgcttgtaataaccctgtgaagtcgattgtcctagtgccatctttacaggcaaggaaacaaggttagagagattacatgacacttaataaaatccctcagaattagaaagatgttttgtgagttataaggaaataaatatccacattctcgttaattccggctgcgcctgtcagcagcgcagaggacctaaaccgagagggcgcagtgatcctgcatgaagtcaacctagcattgaaggatcctcctcagatatgccttgttttcaccacaaactccttctagaattctccacttctctacttatacttcccagcatgcacagcatcccaggataatgagttgtacaagttttcttactacctgctatgtgatttttgccttcaggaaatgtgctaggcaccactcgggtactccaaacttacctctgcctcggctcacttccaagatcagcccagcaccattgactaactaatggaaagtgggaaagaaattatcttaacccccccgccccctttgtagtgctgggaatagaacccagcacctcgagctacacaagggcttggctactaaactaccctgtcagccctgtctcctctggtttctttcatttgcaaccccaatggaatgggtgtgagtcatcaagccaggagctgaagtgatggcgataccctaataccacttcatttccgcatctcttgccggactcatgctgatcattctggggcagagtcatcacgtatacccggatactcatttccatagcgccactgattatactgactgtccctgtatgaaaacgaggagacctggctccgtgatccctatggaagtaattatccacagatcagaacctgaatttgggaggactcacttgagaaggctctaataatatagactcctaggctctgcccccagacccgggaagggtctgggccgcaggggagtctgggaatacagttctctcttggtatttttctgggggttggattcacaacgccctcaaaagtttgcatataacctgtacatatcctcccatatacattaaattatctttagattagttatgatgcctgatagaatgcttgcctataatgcaatacaatgttaatagatataaatcaccctactgtatcacttagggaatgagaggattgaaatgcactgtgcacgtataggcacagtgttgttttcaaatgtgttcgatctgctcttggttgaatttgcgagttcaggcatcactggggtgaacagggatagccttcggtactttgagaagtttcccacgctacaccataacctagaactcgagatctgccattggatgctactgtggagacattcagggctcaagttgacaaatatactctttgtgctgtatgaccctccccccagcccccagtgttgcttgtgattccatctaatggatgccctcctcctttttcaggtgagaagaattcctgttgcaaactgcagtaaacggaaatcctgttcagagtgcttagcagcggcagacccccactgtggctggtgcctcccgttacaaaggtatttcctgaatcttttctcaccagctcacattttttttttcagaaagtgtcatgcggcccaacacttgttgccctactttaatgatccattccacgctgtgacgaagcagagctctccaggactgcaatgtacgatgtaaccataattcattcttaaagatggttcttgccatgtcagtatcaagtcatttgacccaggctacacagggccacccggtctgggccgtgacttgagacgggagaggctagtgcaggtgggtttgctttttatttcctaccaagttagccaagacttcagagagaggcaaaaggttcgcccttggagacgataaaaagaatagcaacgtttgaaatttttcaaatgaatcctcatcatgccgtgtattctgctcgctcggcggaagccttattattaatggcattgtcttcttgcacaccatatagccctgggcctgatgtacaatctcagtctccaggcagaatctgcccagcttggtcttgaattacgatgtatgcgacccatctaggctcaagggcgacttgtagcggcttcctctccatggcagttcttagcatcgtcgctgggaccagcctggttggattcactgttgctatggtaacccagtactccagctctcgctatagaagcaaggaggaaagagccttcactgcagctcaggcaggaatgagaggggggaaaaaaacaagccacatagcagtggctgtcagattggtgctttctgttttttaaaggtgaacacagattaaaaataaaaataaaaagagcagagcaggtagggaaaggcggagggcagagcgaagggacggtagggggaatgaagggcgatagagaagtaaattagagagctcctgggggggggtgcgggggggggggtagggagcgtgaatggagagggtgattatgatgtaagggagaggctcgggaaacaaactaaaaatatggagatggaatggattaagagttcttcatggaggaagtcacaatcttagctgctgcaagagctaggactgtggctgccctcctctctgcacccccttgcgggggctccttccctcagaatctctggcagacaaaagaaacagggccaagaaaattctcatgaataattgtaattggggtaggagccttttcttcttgtcacatgcccaagagtagacttgaagaaattaactgatcacagccagtattatatggttgctgtagttcttttttttttcttcttttctttttttttaaagatccattccatttatgttgcatctctgtgtgtctttggagagctctggacaggagttcattcatggatggtggtgacagtggtggtgtttaaatagccgtgactacttgtttaacaagcttcagtcaggagttggtgggagatgcccaagttggtaatagaattttggagttggttgtattttgatggtcctttcagaagccttaatagtatccgagcagggggcaggggtggtgctagctggaaagagatgttcaagagctgagtgctgaagtacgggagcactcaagtactagagcactcaagtactatgatgtttagaaacagaaggggtggggaaaacatgaggaaggatcagaaaggggagagacagcgtttaaggaaggagtgtgttgccaggcaagggaaagggggaagagagcaacgtactgtgccagctcctgccaaggaggtcaaaggaaaacggatccgttggactaggacagggcgatcgatgactgtgacagaggcccgtttttggaagggtgctggagctacaaaaggacaatgagcagtgagtggaggagctccttgggggtgttatggggaacggtagaggagatatgtcgccgattctgaggcaaaacgtagactccagacagtttaggattctaaagtttatttgtttttcattacattttaattgggagtgggatagtgcacgttccatagtgtgtgtggaggtcagaggaccgctcatgggagttgctctcttctaccagatggaccccagggaccaaactcaggttgtcaagcttgacaggtaaaagcacctgccacgctatctcaccagtctaactttagaaggtgttttgttttgttttgttttgttttgttttgttttgttttgtttttgttttaacatacatagaataatggtgtctggagctgaagaggtgatggctcagcccgtctgtaaagtgcctgctctgaacgcatgaggctctgagtttgtatctgcagcacctgaaaatgtcagccatgctagtgtatgtcagtaatcctagtgctggcgaagcggagacaggaggatccccggaagtccactggtcagatagtccagtcaaattgatgagctcttaagttcaatgagaggccacaccctcccgtaagcaagcgcaaacaggcgcgcgcgcgcatgtgcccaatcacactccacctaccagctttttttgtgtgtgttgttggggaaaattccggtaggaaggagaggggtggggggaaggagggtgaatattgtggtgtgttgtctttcagcagatgacagaaaatatgacctaatcacatcagtggggagggtagcctcagtccaggatgggagggaaacagtagtgtggaccccagagctcgtagagatagatcagacctcagggtatgtccatattgctcggaaccttctttgtgaccttagaccagcaggagccaggtgtctgtgtgagcccggggagagggagccgtgaaatctgaggaagggaagcaggaagcacacaggagctcaggtaaaggacacacacagagagaaaatagagtatggttgcctggcaatattggggcgcacctgaggccgatgatcttgcctttgaaacagaaagcatgggtttgctttgctcatgtagtctagctccagtcccatcatgggaaagtacggaggatagacttcagtttagctagagtttggggataagtacatcagggtggggctatgggatgacattgatgtcacctgtgtgcggtggagggaagtagggacacactgtggatgggagacatgagaggggggaaaacaccacctggactgtgtgggggtcaacgctgaggcgatacaggtgtggaggtaccgggaatggtaaggtctacaggactgttacgtcatggcagcgagggtggagaacaagactactgtgtgagaaacagggacctctgtgtgtcagtcgaagccaccaggaacaaggatgggcccactggtgaagagtaaaggacaaattagtcaagacctaaaactaactagtaaggtgggtgagtgttggtcctgtaggttttgtgtaaggagtcaggatggtatctattgcaaacatgaacttgaactctgagagatggtcagaaagagaggaattatgtggaggagggctgtcaggcccagctgggccacctctagtaagttaaaggaagcagccagccctctagaacagtggtcctcaaccttcctaacactgacactctttaatgcagttccttgttgtggtaacccccaaccataaaattatttttgttgctatttctttttattgttttttttttttttcaagacagggtttctctgtatagccctggctgtcctggaactcactttatagaccaggctggcctcaatctcagaaatctgcctgcctctacctctcaaatgctgggatttaaggtgtgcgccaccacgcccagctttcgttgctgtttcttaactgtaactttgctgtgcgatttgctattgttatgagtcatgacataaatctctgtgatttcctggtggtcttaggtaacccctgtgagtggatttttcaaccctagagaggttatgaaccacaggttgagaactgtcgctttagagggacatggggaagctgtgtcccctgggggaacagtgagccagaagggagttgttagagaattgggtgaggacagcaagccattcttaacagctcgctgtaaggtctctcttcaatttcccctgttcattatctcgctcccccacccttgctgtacactttccagtaggaatgatcctttaaaaaaagaaaaaaaaaatccccactagacggtgtcctccctagattcattgctcccaatttctcctctctcaaactcagcctgatctcctgcttgcagacaaggcattctgtgatttgcagctccgacctctctcatgactctctctccttggtctcactgattgtctttctgattcaagaatattcctgcccagggcctttaccttgaatttaaaagttctccattttagcacactcttcccttcaggagctctttatctgctatcctagaacgtatatctatgtccacttaactacccaacatcagagaagcaacccctacccactcagcaaacatagcggggtcatggttgacggtccttggtagccacgtcccctcacttggctcccagttggctccgttctggcctaagataaaatgaaactaagcttcagatctgtgactcatgttaagctctcggtaccattcaaaattaggaattctaaaggggatgtttttggtgtggtggcgaagcatcccactgtgtttattttaaatgtcacagatttatttagaaaaataatttcttctctgtcttgagaaggttgaaccttcttgtatacgtgtcttgaaagtggatttgggtatggtggggggccaagaaaatgataattaatttcttttttatttggtgttaagaatagtctcccagtgtaataagcagataaaaaaaaaaaccaactaagcaagcactgaggtctagtattttactgtgcgaacctcaggttcaacctgtgctgcagttgtctgtgggtggaaagggaattctttttttcaagctgaatatatattggagttggaagcagtttctcagcttctcccgtatttcgaagcccagcacatgtgttcagttgtggatttccagagaactggcaatcccgagccgatgagcccgacaaggttccaagagttcatttgcaagtttgcttggctcacacgggtgcctttcccacagaaacaatgtcaccaattgagggtggattcccaagccagcccacaaaatccatttcctcttaatttcaacaaacatttgttgaatacctaccaagagcccccatgtgggaagtgagatggctatgtgctgttgagaaaacccagatgtccttcttggctgtaaggggttaacaagcaaactaggagggcagacaggtctatgccagtgatcattcattcagccgtccatctgaccactgacatgtatgaggtacccacgtgttataagcctgacatcccattcagaggcacagttcccatctgaatggcttctctagtctaatgatgggtaagcgtcagtagattctgagtttcttttgtttgtttgttttgtttgttggtttggtttggtttggtttggtttggtttggtttggtttggtttggtttggtttttcgagacaggggttctctgtatagccctggctgtcctggaactcactttgtagaccagactggcctcgaactcagaaatccgcctgcctctgcctctcaagtgctgggattaaaggcgtgcatcatcactgcccggcagattctctttcagtgattctacctaatgagcaactgcctgatccttagaagtctaacgagcaggtatttctctacatttattattttcactcatggatgtgcttgtcagctgtgggaggaggaagaggtttgtgtcgtgctatcagcgaaactcaggtctctttcatgtgtctgtcattgtgtacctactcttaagtcagagagcagatgtagaagatattgaactaagttacatgatgcactcaaagcctctgcgcccatcatggttatggatattctactgctaacacaagctccacagccaagctcgacattagtagggtaaggaaatagaccattctattccgtccagtcagatgtatcataacatggcacggcaaatagcagtagagatgaatcattctggtacaggaagttttggagacttgggaatgtgcatcttgtctctctggaataaaggagatgaataggatagggggctataaggatagacacagaagatgtagggttccatggagacacagatagggcatctaactcccatgtgaaaggttggggaaagcttcctggggaagagatgattcaggcaaatctgaaacataggcaggtatcaggaagggaaactggctgaggtaacaggttggcgaagaatacacttaagttcctgaatgtgggtgtggatgcgtgtatggcatgtttggggggtggggataagaggacatggtcaacagggcagatgagtcgtttagattttgttagaagaatcttgtggagactgagcaactgagcatacaatctggagcaagatggacttgggtcctcgctgggagctggcagaccagtcagcaggtggttatagaaactggggctgggttagcgcagtagtagttggaagcaggtacattggagagctatttggaagccaacactgacgggacttggtgattaattgaattcccccttgagcatggcacactaaaaatagggccataaaatagaagatgaagatggccacgatggaagatgtattctttcttccttgacccaacattgcacaaagaaaagagctgacactcaaagaagctagattctccctgtggcccaggcactgggttctaaggagagcacccgggtcaggtgaggaggacttctgagagatggcagaggggtgtatgttctaactcttaccagcaatacatatgcagacatctgacttgggggaccagacagacagatgtgtccttcactgagcagggtgtaggaggggctatctacttggggtgagcggcaaacagcatcgactgccatattggcacactgggcaaacagcatctactgccgtattggcacactgaagggcacagcagggtaggaagaaataaagttcctaaggatgattcctatgggccgggatctggcctttgtatgagtagcctgtttctcttctacgccaaagcagggttgatggtggtacccatgtctggggctgctgagaggttgaaatcagataatatccctgaaactgcaggcaggagcttgctcctaggaagtgctatagtggatgtcagtaaggaggccgggtcaccctcagcttcagtgggagggtagcctgaaactgggcctggaagaatggtgtcaatttttctctgagggcagagggtatgggagattctacaagctgaagaagagctgagccagaggtctgtttagggagtggcaggttggatttttttttttttttttttttttttgtctctaggatactggttaggaaggaaggaagggataaaggtgctgggaaggatgaggaagtggaagctctgagtttagatttaattagtatgtgctgcgagctcattaaagagctttaagcacaggactgtatctttgaaagatttgtgacttgcaaagattatcgcgacggcagtcgagaggatgaagtgtatcaaggtgggcagcaactatacttacctcctgcaatttgtagagtgagtttatcttgtatctcttccggggtcatctgctcggtggctatttcttgggcccagttataacaatggaacctagactgggtccttctcagaaaatgggctatgcaggaacagccattcacactagttccttaatagtctccatgcacagggtagagacagagcccccaacatgctaattacagggtatctggatccctcttgattatttgtataaatttaacctcctcctatattcttctgcacattttccccaccgtggcaacagttggaagacattcaggcaacccctagaagctgttttgaaattttcatccactcttgggctgttctgcatgtgggattctgaaacatcatttctcagctcagcctagcggcaagcaccccatggtccagctcctgtctgaccactgacaggctggcaggagcagagaagggaaactttgtcaacagccgactgggagcactttctagagcccagcttgctctcctctcttgaggactctcctctccctaagaggcatttcttcaagaactctggtttaattggtagccctatgggaaccctgcccaccacgctgtgcaatgacagtccatggggcacagtacccgtggccatgctcttcccaagccccaatgaatgatctctgttgcagatgctgagcccgcagcatcctgctagccaaagccagccgagtgagctttctcagagagtcttccttggccacagaactccatgcaactccaccctgtgcctcctgctcattcttcctgacaccctaagcagtcaggaatcagtatgactgtcagcctgctttttagagtagaagacaggtgtgggctctaaggaatacttggtggcttcagagaacatgaattgtttttcccccctgaggtgctggaggtgaggactctgaagtggggtttcagtggaccataatagaggtggatggtgcttctccttgatgttgtagaaacacccccattcattcccctttctagcttctcgaggcacctcacattcctcctcagctgccccttcctgccctttcaaatcttaacgatgcagcgtctccagactctgctggttctgtactcctctctctgatctttgtgctcacatcgggctgcagaataatgtcaacccctaccttaagatccttaatttgcccaattttgcagagtgtccaccatgaaggtgacatcatagtcatgagtactaggttgtggacatctttagaagccatttttcaccagcctcagattatacctacctgggtttatgtccagttcccaagccactccattgtctaccattgtagggaagaggcaaagagacaggaaggagatggtgtccctcagagaggacaaagctggaggagcaagggcccgcatggacattacataataacctgtggactgagaaagagaacagaactcagggccctctccagttgcataaactactctgcacattcatccaacagatactgaacacctactatgtgtcctatgttctcagctctaggatttttggtgctctcattaagttacccagagtctcatgcaagtcttttgagcaagggattttagtttctcggagttaccataagggaagttgccacaaagttggtggcacttctgcaagacagacatatgaacccaaggtgtcaatgtggccatgtatcctgtgaggctctagcgcaagatctgccctctcacgtcccatggtggttcctgtggctccttggcgctatctcctgtgatcgccttccttgtatacatccaaacctctctctccttcctcctagcaagataccagtcagtgcagacgttaagcccaggataatcccaacttgagctccttaactaattacccctttaacgactgtatccaaggaaagtagcattcggagggtctgggtgggcatgtcatcagggaggaagagaccagtctcaaaattcacaaggaagttgcataggggaaggcaagcaagactaaataaacttgagaaagggaaagagggacactgagtaggagtggggaaagctggcagttttaaattgggggtcctggaaggccactgtaatatttagcagaatggccagcaagaagacacttggagacagaagatcattacatatctaccttccttctttccttccttggagctgaggatatgtcctcccatgtgcagatctcaggcttgaagcctgtgcagtgacacttctttatggtccagtgcaactctaatgacagtgataatgataatgatgagatttggggcggcccctccttcttgtgtgaggaccccattgtgccaactaattgtatagaagcaagtagggcaactgtctgtggggtggaagcagtggggagcagagaggaatctgctgttctggccttggggccttcctgaatgaccctgacacagcctgaacctgggcatctgggttactgtggatgctggaagggactcgggagaccttcccacagtagaatggggtcttgggacaagcgaagtctcctgggttctttatccccttaatagttgctggaagatccatgggctaagcctattgcactggctggttttatatttcaacttgatacaagttagagtcatcagagaggaaggaactccagttaaggaaacgctgccttgagatccagctgtaaggcattttctcaattagtgatcagtgggggaggacccagctcatgatgggtggtgccatccctgggtcctaggttctataagaaagcaggttgagcaagccagtaagcaacaccctccatggcctctgtatcagctcctgcctccaggttacagtcctgcttgagtttctatcttggcttcctctaatgatggactatgatctggaagtgcaaagcaaataagtcctttcctccccaacttgcttttgggtcgtagtgtttcgccatagcaatagaaacgaagatacctacttgccatagaagaaaaagaagcacacaattgttgaggggcacagctccactattggccccacaggcagttggcagttttctgtaccttatacataagccagtttggtttgtttggtaaaagttggccacaaggacctcaagcctcagcatttcaactcccgtacttatctgcaccatctctttaagtgatgctctaacttccaacaagccccattaagagcaccccttctagtaaatacatgttttaatggaatagagtttttttttttttcctaatgacctatctgtggcagggcactttcataagaacgtattgatcggctttttaaaaattcctcaaatgtttccacttgtctctgtgacctcgtgtttgtcctgttctcagcagctcctccacatctgaacacagtgttcagatctgcattctgagccctgcctgccagtctttggttttgctctcgtaccatcttgaaatgctaggctgtttgcattctgctatttggagtgtgtgctgtttctgatagttgagataggagttgatatgaacctcagaggaagggctaatagtattgctcccacccagtcattgctagggaaatgggccctcaacacctctacagttcttcctaatgacatagggggtgtataaggtagaggtagaagccagaccatcctgggccaagaggcatcactttctcttctgtctccatgctgcctagtttttctaaatacctcctcaacattcttccatgtaaggtctataccagaattgaaaactgagaacttttggtacaccgcacttgtcacttgacgaagaactgcatagagtgaaggccacacatcacttttgtttgagtgtttcggtctgcaaatgtgttttaggtgggctaaacagctctaagtttcaagacaaagactgattttccacaatgccagttaacagactgacctaatggacaaaaatcaataaaatgacttaggcagatatctggaagacatggagaagaatttagtccctttcaactttaattctcagcccaattcagataaactttgctgaacaccagcaatggaccagacccttttctagattctgggggaaacaaagatgaacaaggctgtgtaccctagagaataaaaaattagtgtggggaggagacagtcaataaatactcttaatagctgatgtttgagacacaaggagatacccaaacccttttctcctgggagatggaagagctgtaaaagtcttggaagaagccttgggctgtgcatgcctttgtatgtaggaacacattctacgtagtgaaccaatatagaaaagctatgtgaatggacatatggtcaaccttattactaagacctacctagtcattagcattttgtatttgtttaaggtacaagttttctgactctgccatggacattattgctgtcttagatactgctctattgctgtaaagagacactaagaccaaggcaactgttaaaagaaagcatttaattagaagtttacttacaattttaggtggttagaccatgatcattatggcaggacacagacaggcatagtgctggagcagtagctaagaccttcacatcctgatcccacaggcagcaggcaggaacagtcagttagacagttttggtccggtgtgggcttttgaaacctcaaaaaaagcttaccccccagtgacacacctgctccaacaaggccacacctcttaatccttcccaaacagttccactaaggagcatttaaacataggagcccatgggagccattcccactaaaaccatcacagtttcccaggcaaaactgatgggaattgcttcctaatatgtgtgagtgtggaatttctagtcccttaagataacactctgcaagtgttcagggttggcatatcattcatccttgccttggtaagtcacaaagcatgcataattgaggcccccagaaggcttgtagcaggggacctatttaatttcatgtgacttctatgtcccaaacttcttggcatgaacactatcatctcactttgaaaatccagtataacccatattttcctttatggatatgtcctggggaaaccaagtgtcacttgggtacttacgatgttcctactatggaagactataaacattttagagacagtagagagaatgtgagggctgttgacagacaccatgctaactactctccatgtaccttagtatccttctgtttgtcatggaggtggtaacaatgataacctgtttcatgaaggttaatgagttcttcccactggtcatagaaatagtgggagagccatagcaacgggagggtgttatgttgtgtatgcctccatataaagcctgtattggaaacagtccctagcataacagtgttgggaggcaggaggttcatacatatttaggtctacactcatgaatagcccaatgccagttataaaagagactcaggctgcaattctgatttcttactatttcgtgcacatacaccttctccttcattgctgccttctgccatagaatgatgaagcaagatggttctagctggatgcaagaaactgaccttggacctcctatgggcccttggagttgtgaaataaataaataaataaataaataaataaataaatttcctactcatgacattctgtcacaggggcaccaaatggtgtaaggaaaagggccccttggtgacctgttgtattgtctactgcagtgtcgacatggaacagtggatgcaaaaatggtcttggaaagccatactgcctgatgcactatctcaatccctctgtatactaacagcaccttaggaaagcaatgcggagtcttgtaaaagctgttccccctatctgttaatcagggacaatcatggtaactacttctttagtttagtttagtttagtttagtttagtttggaataaatgagtcaagtcatgtgaaaagacatcgcatggcatataagacatttttgccttttctaaaaaaaaaaaaaagtagtctatatttctgtgttattagcatcattctctcaaatagactgacttgcagacccagtgatgaagagccagttgttttttttttttcagcttccttagcaagttattttggcatcctcccccccccccaacccccctgatcctgactctaggagcctttaattcagagtttggtttgtcacagtgacttcctgttctctttcatttaatggagtctgactccttcatcttgtggactggcaactgtaatgaatgtcacccgactcttgagaccacctggtccctcctttgtgtgctgtacctttcctaaagatgtacacccctgttgcaaatcacttagcaaaggaccttgggatgctcttggagcaaaccacccccctcttgaggatgcagttgcccatgtgagaggagcagagctggattgttggtttgttaaaagttttctgataccttatcagtataggatcttggggacaggtcacactcaccccacgttcaagccaattacctgatatttagttatcgaattccttcagggactgtctgctcttggtgaacaattagattagaggatgctgatgaaattctggtggcaggaagtgggagttacatttctgagctcagagtttctatttcaaggttgagtaagtggtaaatttttactgagggagtctagcctaatagagtcagattctcaaggtctgtccccgcccccaccctggcgcagtacgtggatggacacttcaacctgcctggaaaacttcaggtttcaggttttcggaagcgggcctccctgtccttcatgttggcatgaaaacaattaataatttaagccagacccattttaaaaaatagaaatgctatacaaatacaataacgataaatttaaaagtcgatccagttgggcaccattcccagactaccaactgagcagacacacaaataagtaaagaagaggaaaaactgctatataatgcaaatggctgccatctccttgttttctgctgttcttttattgcagatatataatatcaaggctacattatgggtaaataggttttgtggcctaacccagaaaacctaatcacagcttataatattatttctatgaaggaaatatattttatattataaacagatggttggcaagcagtatttggagcacaatcagtttgtaaggctgggtctaccggggattttaacctttaacagaactggatgctcggatgttgaaaccacaaggcatcttagaggaccccggtgaagtgattctctccagaatcttcaccaagattttcatcttaaaaactgcctcccccatctttgttctttggttacctgagacccactttcccgtcttggctcagcctagccacgctttctaaattctgttgagaccccaggaaactgggaggtactctgagaggccttatcctgtgcaccttataaaatggtggccagggtcctaggaggctaccagtgagagagcctgtgtgcctctgaacctaggtcatgctagaagagtggttctcaacctgtgggtcttgaccccttcgcagggcgagtgaccctttcaaacacacatgtttacattagaattcataacagtagcaaaattaaagttaggaattagcaacaaaaataaagtttggggttgtctcaacatgaagagttacattaaggggttgcaggatcagaaagttgagagtcattacaacggaaagagaactaacgggaaatcactcagataagcacccagcacaggtgctgttgctgccatgtttgggttgtggagtttttcaggtatacgatgggctacacagatttctactgacttcggaagcaaactcaccacatcggagtggtttctgagtgtcagagagtgagcttagcagtgtccggaagctccattggccacttgaggctgagtagcttggaacatgttttctgggttgcagatggggaggaggatccattttcttatatattcgggtggctgtattaaagtctattattattttgaacaaattgagtctataacacatttctagtaagctgagaagagacttcttaaatagttgcatgcactaattgttaccacataaagagttttcacctaaggaaagtttttttttttttaatttaaattaactttttaattcccttcaggaaatttttttctttgcagttggacagttttatgttctaactttcaagtagatttgtatctacttattgacttgatcacgtaggcatgagatctaactaggaataggaacaaaataaaataaaacagtgagttagagttttctagaggaaccaacacacacacacatgtatgtatgtatatatttatttatgtatgtatgaaatcagcctcattgaaatagtacaactgctatctcatatctgagaacctggtaattgcttggtccttgaggctgtgtgcctcagcagttagagtaatcccacaatgacagtctcacaatggggaagctgagaacccagtagttaccaagtctacaaggctgggtacgccaacaatctttatctcctgccaaaaacttggagtgtttctggagagccactagtccccagtcaacaagagcagcctggaaacaccagctctaactctaatgtcaatgaaggaaccagcagcagcagaggcaggtgaattaattaaagcggcaagatggaggaccaagtgagcaaaatatccattttaatttgggctgctaccaggaggcaccatcctctttcggggtggttcttctcagatcaagcagggcagtcagggctgtcctccggtgaggctttttactcaggtgattctaatttgtgacaagttgccattagggccaaccagcacaaatagcgattgctttcagattgatcctattgtgatttaaatatgttccctgcaaaacctgtgttctcctggagttgggaggtggggcctgttggaggtggggcctgttgggaggtgtttatgaatgagggctctgtcatctccagacaggcttgagactgtgagttctgtctctcactctcgcctttttcttacccttccattatagggtaatgcatcaaaacatgcccttgccaggtctgggtccttcagccactgacttgtaaaactataagaaaaaaaaatatattcttcacaaattactcagtttctggtatcctgttataattatacaaaatggaattagcctcataattggtactcagtagtaaggctgagatataatcaatacctgacagcgtgggcctggctgggaactggtcatgggtagaagctgtaagagcctgggacattgggagggggaaaaatctatcgcagtgtgctgattcctttaaaaaatatttattgcagtggtgtgaatgtacaatacttagatatgctgtatatatagtgtaacatctgtatatttaatcataaaggcagataattgaaaacattgtaaaattaagcacttcaattcttgttaaatatgaaacatttgtatcttgtaaataaagacatccttaaattggttttggaaaaaaaatatttatttttattttacaaatatgttagagcctgcatgtatgtaagtatgtgtaccatgtgcatgtctggtgcccacagaggccagaagacagagttggatgcctagaaactggagttataggcaaacgtgagctacccagggtgtgtgcttgaattgaacccgggtcctctgcaagtccagcaaccgcccttagttgctcagctatccctccagcccactaagggtcattctaatgtagatgtacagattagcaatgtggaaaaagcctgggacttcctagagattacaggcacggtcgtgatcagaatatttgtagaaatatggaaggtgaaggcctctgacagggtctccagtgaaagtgaagtgcaaagatttggaactgggaatagaggccatctatgtcagttcctcttgtgttgctgtgctaaaatgctagaccaaaagcaacttgagaaagaatattttagcttacagtagagagaaagaagtagtcatggctgggaatgcatgacctggtagcaagggtgggaaggtggctggtcacagttcatctgcacatgagaagggggaggggctataaacctcaaatcatctccctcattacataattcctccaacaaggctccacctcctaaataacctccccaaacagtgccaccaactgagggtcaagtactcaaatacatgggcctatgtgggacatttctcattcaaaccaccacacaaagacagtgtggtgatttgaatatggttggcccataggtaatggtactgttgggagctgtggccttattggaggaagtgtgtcactgcggttgtgggctttgaagctctttgtggtaaagagcttcttcctagctgcctgaggatgccagtctttctggttgtcttcagatcaagatgcagaactctcagatccttctcgagcaccatgtctgcctgcatgctgccatgcttcctactgtgatgatcatggactgaacctctgaaactataagccagccccaactaaatgttttcctttataagagttgtcatggtcacggtgtctcttcacatcaataaaccccaaactaagacacctcgttaacagttacaaaggggttggtagaactgtgcccatgatctaggactctgtgaaatacagattcggggtttctggtagaagaatttctaagctaaatattgaagaagctgtgtgattaccttttactgaaagaataaaataatttaaatacagagtttgtagttaaaagggaagcggggagaaatttttgggaaattctcacctggccatataaaaaatgaagaggcatttttagaagatggaattaggagcgtggccacgggaccacttactggagattactatatataaaaggcaaccaggttctagtcatcaagagtaacaggagaatgacctcaaagacactcttcaaagtaggttggacccttagggtaaagctgccagagaggttccttaaggtccccagcattcatttgccaggccactttgggactttgctgcttgtgttctggttcagtgttccttggccatccaagctatggctcaggcaggcatagatacagcttggattgacattctggagggtcaatgtggtagaccatggtaggtagcatctacttggtactagttttatacctatgcatagttcatgggctaggagcctatgatagccttcatctaaaatcaaaaggctatcacgggcagcccgggagtccatgcagaacttactacagggataaagggagtgtatgttgagagtatttactatagcgatgtctagaagcttatgggaatggtgtatcttctgagacctcagaattatactaacactaaacccttcagctgcaggtaccagacctaacttatgacagctactaaatggactaagcccatcctagcattagtagaactgcctgagtgcctgtgccaggatgtggtccatggacttaaaggaggttattctggagcctgaagagttaacgttctcctccttcctgggctgtagattacatggaatcagtttctgcacacttagtttttcttatggaatgagaatgtctgtctgcctgtctgtctgtctgtctcatctttgcattttgggagcacatactatatttacattcaaaaatctcagggccggagatgattgtctctggatgtatcagacataggttctcacccacagccactttaggtgagagcccagattttgagttagtacggagccaactaagtctttgggggctgttgagatagaatgaattttctggcctggttttcatgggagagggacatgaagttttagggtcagatatgccatggtgtggcttgagtatgtccttctcaaaagcctgttcgaaacctatactctggtcggtcagttttgaggggtgaggtggagattaatgggagatcaagagcaccccacccccaccatgaaagggagaaactagcaacagtgaattctgtgtcttttttgacatcctcttctcccagggaatgacacagccagagatgtttcaccagagtcaagtgcccagtcataactatcccagtttcttaagaaataaatctttattttttttataaatatatgagtctgggtcttctgccaaagctgcacagatccttggaagagggggagcacatgccccagcataagcaatgaacacatacacaaacatacaaagaacacacacacaaacatacaatgaacacatacacacaaacatacaaagaacacacacacaaacatacaaagaacacatacacaaacatacaacaaacacatacacaaacatataaagaacacatacacaaacatacaaagaacacatacacaaacatacaacgaacacatatacaaacacacaaagaacacatacacaaacatacaacgaacacatacacacccctgacattttctccagaacacacttgggctaagatgactccagtttccctcctattcaaaatggcctggcaaagtggaacgaaaaccagttaagagatctaggaatttggctgacaagagagcttgcttgtaatcctagcccttgggaggtggaggcagaaggatgagacacttgaagccatctttgccctcctacattgtgattttgaggccaccttggtctacatgagaccctgtggaggatggagacagaaactggagaaggagaacctgcccatcgagtggtcaagtggctcatcaatcgccaagtggaatgatattttcatgtcattccgggaatggcttgagaatttatccatttggccatttccttgatgggtccacaagaataagaacgatttgtttcaacagaaatcatcccaaaccccctggttttgtttactaagatgtggaagcgctgagctctgctccccctccttgagaaatgcgaatgtgtgggtaatgtgctgtcgagattttacaatctgcaatatttgagaagtaataagatactgttgttggttgaccatctggttatacatacttggtgttgtggtttgcttttttattctttcatttttattgttttaaactggtgaagggcaaagaatgagagttagaaaaaaattcagatttggctttcttatacaaacaaagaattcatatttagatgtgcaacccagttagttgttgtttctagggggagagtaaatgaacagtccagtatatatgttctttcattttccttttcaaaaataaataaataagtaaactaaccttaactcctaatttgatcttcagctccaaacttttggcttatgtgaaaatcagtctcgttgcctgaaagaggagtcaagcataaatcaaagctctagaaagaaaattcaccagcagaacggtcctatagagatttcatatttcatccattcactcaaaaatatttatcgaaaccctagtatttgcatctcgtgctggcagacgctgagggatttgctaaagaaacatcaagatgttctccctcccttccaggggcttagtgctttctcggggagaaatggcatggccatgtgaaacagttaagttgtaattcaagacagcatatgattaaataccaaaatgtgtggttccgacaagaaatgctatagttcagagaagggagtgataactttgtagcatgactggtttttctgcctacaaattggcaaattgtagcactatttgtatgaaatattttacacttgcttttttggcagccttaggccttgactcccagtcagcattaagagcctgcaaaaatatttgtactccagtcactgtagaattggcttaatttttctccccttctttctcctatgcagaggaagtgccttggtacaagccagagggcccaggagagacagggagttttgagtcatgaactttttcagatacaaataaggcaccagccttgtcattctctgtactccagagctgccatgctggcaaactccctctgacattgagagaggtctaatttgaacttaatgtctgtgacggacgagtgagccattatgggtcagatagatttatggccttggagaatcactaatgaaaatccctttggttatgaagttggagaagggctaacccagatgtaggaagggttgagacacatatgtgctcctggggagcccagttccctggtgggtgacaagctaaggggacttgggaatggcggctagaaaaacttaccaacttcccattctatatttgtcatatccaaatgagcacaaaactcaaagaaaagccataagactaaattgttaagaataagagagagatgataggtagggcttccaggggagggagggggacaccaaccctacccataaaaccttcgaccctgattacaagatatctggggataaagatagagcagagactggggggatggccaaccagtggctggcccaacttgactcatcccatgggcaaaaaccaattcctaacactagaaatgatgttctgctaagcttgcagacagaagcctagcataactagcctctgagaggcttcacccaacacgtgatggaaacagataaagagacccatagccaaactttaggcaaagattggggagtcttgaggaagaggaagagagaggttgggttgagggagctggaggggtcaagcacaccacaagaatacatacagaataaattaacctgggcccacgggagctccccaggactaagccaccaaccaaagagcatgcaggggctatacctacgacccctatacatatgtagcagatgtacagcttggtcttcatgtgggtcccataacactcggaacaaggactgactgtctctgaccctgttccctgcctttggctcccttcacctttcagggctgtcttgtctggcctcagtgggagaggatgcacctagtcctattgcaatttgatgtgccaggttgggctgatagccatggaggctgaagggaagggggagttgggggaggggtgggagggtgggactgggagaagaggagggctgtgatcaggatgtaaagtaaaataaataatgaaaaaaacagaggaagaagaaataaaatcttttgaagtcaatgtatcgtttgggccctttcataactgtgctgcccctcagtgattgctgtcaccatttaaatgtgttggaatctcatgaactaggagttcttagttttcttttaaaactccacagttgtttgctcaggctcaccttcattttaatctttgcctggaaggggtgtggtttctcaagctactccatgttactcgttggactgtctgcatggtgctgtgtcacttggcgatagggttgcacttggtgttcactcccctcattgggttggtggcccatctgggaagttaaaagtgacccggagtgacccgcgcatcaaggaagccagtgattgcagtgtgagagcatctattcatcaaaggacctggccctggccacagcttaagatttatttggggcatctcctgagctggctgacctgggagagtggccttgcaaaatattttgctcgtatcttttgatataatttggtatctgtctaaataaatgttctggagcagatggttacagaatgtcttatcatattcttgggcagactctgcccttgaaatattttcatttaatcatcatgttgcaaagctcaaaacagtagctttattatttcttttgagcacaaaatgaatctcactcaataggttggtattctggttaatgtattgcaagcctaaaatatattcaaaatataaaccttttctgggctggtcttaagcggaatttctccacaggcactctttattttagaattcatggaagagtatccttccatttgaagtatttgatgatgtcatcttgggtgatagcctagaagctgaagttcaacatgttgtcaacatttgtcctctgtccctaaacctgatgaaacacacacacacacacacacacacacacacacacacacacctctgctatttctttgttgcttttcatgagtttaatatcaaatcccttttctcattcaaaatcaatagcctaccatacaaagtgctttgtactactgatcatgagaaagctgtaattaatgtgtgtgtgtgacaatttatcagttggtgtcttttgtttgttttgttttataggtgcacttttcaaggggattgcacacatgctgggagctttgaaaactggctggatatttcatcaggacctaaaaaatgcccgaaaattcagatacttcgaagcctccgagagagagtaagaggaaataattttatttgtctttatgatattgtctttatgatatggtacagctgccttctgggtataaagaaaatcttttcacaatgaaataggcttcatgacaggactccattcattctgttggtgaatggtaagggcctgccagatgttgtctatctgcaaagtgccaaggatgcagtaatagccaggtcattcgtggtacagcccacccccatagaggctgccatcttgctaagtaaagatgacctttaggggttgaaatcaaagagaagatgcattttttttatgcagaagatatccagcttgattttaaaaatagaggaacaataagctcagacttatagttgagtagatccctgcaatgtggatctcagtgggattttattttgatcagccagtcttaataccgctgtcttcagtctttgaacaactgccggtgcaggagtcaagcaggagcatgcaccaaagggtgattgggtcccttggaaagctcctgacatggcgtgaaagagggacacagagagcgcattggagcagagccttccctgatgcccacacccaccctgccttgaggggaatagaattccttacatgatgctgtaaggagacatttcctccctaatcatggctcttgtgttatgagtaattgcacagagtccccgtcagcagccagttgacctgtcgactgcactcactgtgttctgtgtgaatgccacattaacaaggaaatgggccactttctcttctcgctttgccatttcaaatagcaagaaccacgccacttaagatgatttaacatttaataaaggaaagccagggcatttaatgagtgataaataataaaagaaccaagctttcaagtcatgaccgatcagaactcatggattgaaagttacttgctattgttgcttcctgtcactctctgaagcaagggcgagctccaaatctccaaactcctgccagctccgtgccaggggtcagaatcagagtaagtgaagttcagccatccatacacaggtgtagtcaagttcttttcttactgatctgaagaaacagccggctttgatgctaagtgctaggcaaaaagcattaagatgttttgatatcctcaggactctgatacatggttaagattatgcaaggagtttttctctttgtcattgaaggaactgttaagggtgatactataccttagaatagaaagaaaaaaaaaatagcttgcttaagtgccgcttatacagttagcttacctatctaggggtggtatagccaaatcaccatttacatgtcatctggaacatttaaaaaaacctgtttccactcactcaggagtagtagatcacccctgtaatcccagtgttcaagaggcaagggcaggaggatccctgtgagtctgagggaccagcctggtctccataataagtttcaggccagctaggactccatagtgagaccctgcatcaaacaacacagagccaaaaaccttgcccacaaccactcgttcccccaccctgtgtccccactgtggcttaccgatgggcctggccgtcttcccatgcagccattacatcactgtccacaaatcagagataagttctttttttttttttaaattcacatgctactatttcacgtgtgcttgtgcatgccatagcatgactatggtcagaggaagggtggagtgggttctcttcttccaccgtgtgggtcctggggctctgactcaggttatcaggcttgtctataggtatctttacctgctgagccacctcactggctcaatgatttgctaatttcccttcaggtcttctttaaaactatctctgcacttatcttcctcccaaccaagggattgaatcttatgcatgccagaggcaagcactctcccacttagctgtactcattagctctagattgttccttttaatactactgatgcggttcgacccctctttctctcttcagctctccctgctctctctttcttctcccttcctgctttactgccgtattaccagacctggctccttctgatcatgctgtttccacgtatttcttactccctggccatctgtgacgtacatgaaagcctcaggtcaccgtttcaatagtgcccgacccttacctaaagagatggcagtctgtggttgttcccaatacaatctattaggtaaggtcaaagagtatttgctagctgtccatcatatgcctgccaacatcctagcacctttgcaggtatggaataaaaaatacattacagaaccttggctcataagaagcattatttcattacccaaaagcagccagagaataggatgtcttcatcttcactgagggattcataattaaaagaattaattagagaagcacctgttagtctgggatggatttctctaaggtttttgttgagcagaaagaagaagaagaaggggatgtagtctcctattgaaccgaaatttcttgttggtgctcatctgtctccgtgtgattatgtgagcattgtcttagtcagggttctctaaaggaacataatttagagggagggaaggagggagggaggaagggagatatgtttgtgtaaatatatatatatatatatatatatacatatatatatatatatttaaaaagggatttactaaaatggtttatagactgtagtctgagaagtcaaaaaatcgatgtctcccaaccacaaggccaaggatctagtagttgctcagtacatgagactgcatatctttatagtcccaatctgatactggaatcccaggtacattctagaaagcgtctaggaagaaggctctgatagcggcaaagaaatgcttcagtaacaggatagatgaacttgctagcaagagtgagactaaactggcaaaaagcaaaagcttccttcttcgaggtccttttacgtgggctgccgccaaatgtggcctagatttacagtgaatcttcagatctcaaatccaagcaagaaaatgctcacagctgtgcccagttgcttgggttatagttgattctggatgcagacagcttgacaaccaagatcagccatcacaagcatggagatttgtatggaggcattggttccaagcgcggcttatgagcatggccttcccagttgaatggctagctaacggagaagggaggccagtaaaaccggaacccgagtcacggtgcagacatggtcccatggcattacacatgcagttaagaacactgtgctcaacacatacagagagtgttagtgttcagtgaaaatcattaaccaataagaatatgatggattaggaacagaaaacttttttttcttcccacaaaacaacctggtttctaaaggagaggtggcaaagagactcttccacaaatcagaacggaaaaaaattctaccagcactgcttgtgtcaacagtgtctcttggccagtcgtacaagaagcaagtagttgggggctggagagatggctcagtggttaagagcactggctgttcttccagaggtcctgagttcaaatcccagcacccacccacgtggtggctcacaaccatctgtactgggatccgatgccctcttctggtgtgtctgaagacagctacagtgtactcatagacataaaaaaaattacacaaagcaagtcatataaataattgaaatgaaatacagaaaaatgtcactgcttgctaaccctacactgatgcatatattctaaatatattcatttgaaaaaccattgtcagattccaagatgtaagttgcttgagagagcacacgctccctagcatcgccaaaatttaaaaatatcaaaaactacactaaataaataaataaataaataaaaatacagatgttcaatcaattctcagcattcatacagtgtgtcaggtaaacaactatcaacttccagtctttggaaaaaataattcatttataaaagcaatggaagtattcaggaacaaacttcagaaacaacatgtatttcctgtatttaaaagttacttttaagctgagcaatggtggcacattcctttaatcccagcacttgggaaacagaggcaggcagatctcttgagttcaaggccagcctggcctacagcctggtctacagagtgagttccaggacagccaaagcttcacagagaccttgtcttgaaaaacaaaaaccaagcaaacaaaaaacccaattacttttactaaaagacactttttggagacagctaccaaaaacagaatgttttttggcttgccacagtttgtctcagccattcccccccccccccccccataataagaaggtagcagaacagagagtggtctgttgagcctatttatagtttgtcattgtataaccttctcaattagaaacataagtgtaaatagatatgtagaagatatctctttggaaagtaggaaaaacatctatgtatatccataaacatcccatgtttcttaggagaatttacttccatgacttatttttctagattttgaaatgagtaggaatttactttatattaatactgtatttatttggaataatatgagctgatttgaatatctagtgtgtgtgtatatatatacatatacatatacatatacatatacatatacatatacatatacatatacatatacatatacatatacatatacatatacgtatgtatatatatgcatgaccactgttaataattataaacaaatgcattattacacaaatacattgtctgtttgtacagtatgtatataatggtcaatggatgacaacagtagttcttaatttgttctgactttaaaatagtaagatgattgatagaatacaactcaaagatgaatacaagaattttaaagatcagatgttataaaataaggagaactagaattttataaaaagcaatgacttacaaactatggaaacattcacttcataattcatgttaaatttaaaagtacataattcagggttgatgaaagggctccactgttaagaacactgccgctcttccaaagctcgactcctacgctgagtggctcacaaccacctgtaactccagatctgacggtcacttcctgcttccataggcaactacacacacacacacacacacacacccacacacacacacacacacacacagcataccctcacacactctctcttaaatacatacaagaaaataaaacaataaaatatttaaaaatatataaagtgaatctaggataattgagtaacttacataaagagtcacagaaaatggaatcatatgtcacatagtttgaaggtatgataattttctttagctctgaagtatgtagtgacaaaaaaaatatttatacaatcagtgtactttaaaaacagttttgggctagagtagtctaggcagtagagggattgcctagcttatggctttaaccctcaacactggcaaaagtaactatagaagagggaaaatgaattaataaggcatatatgtctgcaaggtatttgccatagctaaaatctctcaagacaagaaaactagggaaaaagaaaaagagaaagattaatacacgaaaaagcaagtagtcaaaggcaaacgtcctcaaagagcaggtttgggaaagtagctataaatatggaaataggttcaaccttgctagttatggaataaatacaaattaaagagataataagttatgccaacacccagtgttgctgatgccaattagcacaacccttttggaaagcaatttggcagtatgtctcaaaagtaataaatatattcagttgtttaaatcgctaattccaggcatagaatccaagggagcaacttgaaagaagaaagccctacgcataagcctctatggcggcggcgtttatagcattagaaacctgtttggcaataaagagaaaagttaagtaaaataagatccttgcatgtccacatgatggaatgttctacagcagtgagttctttggccctgtgtttactgcagtctaattgattttccaaccatccctgcatcccatctgaccccagagtcctaccctttcctctttgttcagctgtgctcaacaaagagccatgaatctggtaagggttctcatattgggctggggaagctctcttagttacttttctgttgctgcaatcaaacaccaggaccaaggcagcttagagagaggagagttagcctgggcttgtggttccagagggacgtgagtgagtccatggtggtggggtggaggcaagggggcaaatggcaagaggggatgggaggcaggaagctcaccttgaactgtaagcatgatggagagagagaaaaaaatagtgccaagattttaatctcaaacacacacacacacacacacacacacacacacacacacacacacacacactcagtagtgaacttccgccaacaaagttgtaccactgagtgccaccaactgggaccaagtgttcaaaaatctcagtgccttcaaatcactatggaagccagagcttcagcttttaactgtattcgtcaggatctcagactatctccctccctctccctctccctctccctctccctctccctctccctcatactttcactcattcacacatacatatatacatttactttctttgtctgtgcttttcatgcagatggttaatctttaccattacccgcaaggtgttttttacatctagtcctagacctttatctacatattgcatcttgcctctgttgtcgctgaattttattgctttcgatttatattgtagttgtgggcgtgttatacttttgtacgttactcaaaatttattttttgttttttccatttactaatacttttatttctgacctctctattttttcttctatttttcatattttattcttaccttctttgtttttcatgattttgtttctctatctctcatttttcctaatttttttatgttgtcttgtattctttacatttatctttctttatcttactgcttctaattcttaactctctcttatatactcttctatctctcgacactctcctcttattatttttattcttttctcttttttttatatttatccctttctctttgcattctttatgacttattgtactaattcctctcgcttattttgtattgtctctattttgaactctctatatattttcactataacatcttntcctattgctccttatgttttcctctctccatactctctaatctatatacatcttaacgattattattacatgccgttcacgtgattgtcgctcattctctcgtttgatcacgctcttctttgtaacactttatatacctctgctactctcctctcattatcttctcctcctacttctcattttattactttctccactcttctatgttctactcatatatttcctaattcctnnnnnnnnnnnnnnnnnnnncggggcgaagagaataataagtataaaagttaaagaagatagacttagtcgaaaaaaaggagcgagaaacaataaggaaaaaggataagagagaggatatagagtgagagaagcgactaaagctaaagatagagagaaggatacatgaaacaaatagaatttggaagaaaaagagagaaagaagatagacagaaaaaataaaagtaggaatatggtaaaaaagcatagtacaagcagaaattgacatataaaacatgaaaaagagagatatagaagagataaaaagagtggtagttaagagagggttgaaggaacggcctctccctctccctctctctcactcatacacacacacacacacacacacacacacacacctttgcttcctgactctgagcccctcccactgtacctgaaagagtatgctggcttctatttcctacctggctgctccttcaccatcgttcccttgatcctgctcttgccaaggtcactgttgacctctaccctaaagtccttgtcctactgggatgattggcagtgttcctttataattaattaattaattaattaactaattaatatttgcttacttatataggtatatgcttgtatgtggctatgcatacctatatagggcagcaggtttcctcttctgtctctcttcacttactcctttgagacgggtctttccctaaacttggggctcacattttttttaccttagtctggaaggtagcaagctctaatggtccttgtgggtccacttggcttagagctgaggttctaggcatttgcagggataaccagccttttgtgtgtgtcctggggtccaaactccggtccttatgattatggagtgatcactcgaccactgagcacctcgaagtcctgaccaggagcattcatgaaaccccctcttccgttgcctgtgcataacacaccctgtcttagttactcttctattgttgtgacagaaaaacatggctgaggcatcttgtaaataaggcatttagttgggcttaccattacagggatgtaggtttactccgtgaggatggtaaaggcatgacagttcagacagcttagagtttgtatgttgatccgcaagtagacagaatgagacactcggaatgccaaaagtcttttgaatcctcaaagcccacccccagtgatacacctcctctaataaggccataccttctaatccctcctaaaaagtttcatcaattggggaccaagtattcaaatatatgagcctgtgggtgccattctcactcaaaccaacacttaacctctccacttctccttatgtcacatcacatcttgttgactctaggaaaaaaatatgtgtgtgtgtataaatatatatatatatatatatattatatatatattatcacatatattatcatatatatagtatatcatatatgtaataaattatatacacacatatatacacacacacatatacataaacacacacatatatgtgtatatatattccagtttggactcattctttttactctttgtccatacaatcttatccacttatccacttccatggctttatatatcttccgtacattcagatttcttttgtgtctagccagtatcgattgatcctctgaccttcaggcctatcttgatatatccttttgatgacatacaagtatcttgaacttgagagatccctcactcccttagcaagtcccacctcagcatatacttaccacttctgatgctttcatccatcagtcttctcaccagaatcctcacattcacatccctcccgccaatcctgttcatccaacctccagatggttctcctaattggtctgattctttctatttcactctgccactatagcccaggcttctgtcatctcttgatgatgtcttgatgccatgtgaccctctaggttgactctactgggatgtctgtctgttcttctgtaaactctcaaaggataaggactgtagttgtttagctagctggttacttggtgccttgagcagcatttggccatgttaggagcttgttatttatttatagaataaataagcagaatggtttcagttatgtaaaaattatgtgtgagaactggaaggaagtggggaataattaaacagctgacgaaaatgggatttagaaaaaccactgatgaaggaattcagagtaagagacacacatataagaaatatgtagttatgcaccagcgtgtgtgatggagagagtatcatgggataaagaattcaatatgaccgagagtgcaggcccctgagaagataaactagcaaggacagtttggagttcattcccatactcctgtgaacttgtggtggtacatgcctgttaacccagctcctcagaaggctgaggcagggggatcacaaatagaagccagctgggatgcgtatgtagaccggttgtaaagtgcttgcctagcgtgtaccaggccttgggtccagtccacagtgtcacagataggtaaaaaatgtctcatatagatgcttagacttcaggccaggtgaacttggtctgaaggaacctgcttcccacagctttattctatggactgaaaacacattttttaaaaaaatattctaagattggggtatagattcagcaagctgttaggggtccaggagagacagcagggaaggcataggtggccatataggaggtctgagcagagatcaggaggatgagaatggagaccccccaggtggtccaggccgctggtctccatcacaggtgaaagggctacctggtccgccactcagcttcccacccttaacccatctgccgcctgaagtcagttgatctgctagcatttaaccctttaacttcccttctcaatgagagagctgccttgattctttagatatttcttgtggagaaatgtgctttaggagtttgggacttcaagtcttgctttttggtcctcctacatatgcactgtatgcctctgcgcatgcacagacactcagaaaaccctcttcctgtaaatctcctcggggatttgaccacatggtaaaccatagctaattttaaaagcagattgagctattatctggtagcattcataggaaggaataaagaggtggcaagggtaccttaacacccaaaagatcaaggaacagcctcttaaataaaccatggattagagtcatgcaaatgaaaatacaatcctgtgtttgcatgggaatgcttaataatgtagagacatatggttcaccaaaatgacagaatacttttgctgtttcagtaagatacatcatcccctcaacctctcttggataattgtgattctcaaaaagatgaaccatgtctaggaatccctatgaaaataaagataaatcaggaggcatttgccttattagatatttaaagtagtaaaaacgtagtgaccatgggatagaagtagattccaaatatattacacgtattatatggtaatacattgcaaacaggacactgtggtggtttgaatgggaatggccctcatacactcctgtgtttgaacacttggccatagggagtgtggccttgttagaggaagtgtgtcactgtggagacaggcttcaaggtagtatgtatgctcaagctatgcccagtggggcagacagtctcctgctgctgcctgtgcatcaagaagtagaactctcagctccttctccagcaccatgtctgcctgcatgctggcatgcttcttgctatgacagtaatggactaaacctctgaacctgtaagtcagcccccagttaaatgtttttctttataagaattaccatggtcatggtgtctctttacaaaccaagaccaaacaaaacaaaacaaaaacctaagacagatatcttgagggatggggagatggctcagaagttaagagtgctcgttgctcttccaggggatcctggtttggttcccagaacacacttggcagctcataaccatttgtagctccggttagggttagggttagggttagggttagggttagggttagggttagggttagggttagggttagggttagggtctaaccctgatacaggcacatatagatacatatacatatatgcaagaaatacatttatacaaataaaatacacaaatctaaaatgttttctgaagtaaaagtgatatcttgcttcagtggggaaaggaaagggtttttttgttgtttaggaaatggtgatgatatagctaattagccatctggataaaaataaaattggacttttatcccacactatagatacacaaataaattccagatgggttaaaaatgttaagtttaaaaaacaaaacagtaaggaggatggaactatttaattcttgtctgtaagctagagtttaggacgcatttaatagtcaaaacaagaacactgatatctgcttacataaagagatgctgtatcaggctaagagattagacaaacaaaagtcaaaacgaacggtagattatgagaaagtgtgtcagaaatatgacagataaggattaatatctacgtggtgcagagagctcttcaaaattgataagaaaaatacacagcagaaatgtggtcaaaaacttggaatatgcgtttcacagaagaacaaatcaaacacccagtaaaacccatctgtgttttaataccagctccctagagaaactctccttcccatggcaggttgtcttacttagggtttctatttcctgtgaagagacaccatgaccatgacaactcttgtaaggaaaacagttcattggggctggcttacagtttcagaggtttagtccgttatccttatggcaacgagcaggaagagacagtgaaccacgtttggcctggcttgagcttctaagacttcaaagccaacctcctagtaaatcacctcctctgacaaggccacacctcctctgacaaggccacacctcctaatcgtgccacaccctctgagcctatggggccattttcattcaaagtagcacacaggtctacaggtgatttcccataaggctttaggagggataccgacggtacaaaccaaccgtgtgatatgtgtcttcctccctacacagaccacagtgaccattgtgggaagcatctccgcaagacactcggagtgcgtggtgaagaacgcagacacgggcaagctgctctgccaggggagaagccaactgaactggacctgtgcctgcaatatccccagcagacccagctatagtatgtggattcctctgggcaatcattatacagtcaagaacaagagcctctcctgagttcagttactgggggttggggtagttcccttcctgtctctttacctctggttctcacccaagtcttcactacatactacccccatctcctgagtctactccagcccctcactttctgatgtgactggggagagatagggaaggagacattggctaagagagcttagtaatactaatgtaatattactaggtacctataaccataaaggcacctttatgtcttaggattttattgctttgaagagacaccatgaccatgacaactcttagaagaaaaacacttagttggggctgggttaagtttcagaggttcagtccgttgttgtcatggcaggaagcatggcagcatgcaggcagacatgatgctggagaagctgagagttctacatctggatccacaggcagcaggaagagacagtgagccactctaggccaggctagagtttatgagacttcccagcccaaaccagggagacactttctccaacaaagccacacctactccaacaaggctacagctctcaatagtagtgccatccctatgagcctatgggatcattttcattcaaactacaacacctggggtggatctctttttgggtgatatcagtcctgcaagaaggaggggagataagccagagaaaagagagaaaggaatgcaaccagagaccagcttgtgtactagacagaagaagagaaaggggcttaaactggggaactaaaaaaaggctctctatgagtggagcaagcgggataggggcagggaggaccagacagcaggggagctaggggacaatagaagaccatgtgaaacgtgggctccatcctgggacgtctcagctacaagtagcacagtcagattcattagcaggaagagacaattgtggatgatctatccctggagaagataagccccatggggcaggaaccttgaaaagtttgttgctgtgcatagcattgtatctagcccagtatgtcagtggatttttagggagtagatggacaggtgaatggtaatgaatggagaggaaagtaaagaactgaaattcttggttcctaaagagtggctaatagaaaagccatcgaggtggtccagacaagagagactaagagaaggtactcgaggcgaatggatgcaaagtggacatctagggatgtccaggaggctcaaaagaggattcatgagtctgctaagatggaaaagacttgggagagttaaggtgatggtgggcgcctcctagaatgttatcacactggagctgtttgagttgcttgtgagcagcaaagttactattggataatgtatagcatggtaaaatttattgcttatagttccagaggcaggggatcctagatgagggcatcagacaattcagtgtatggtgaaggctttctctctctctctctctctctctctctcactcactctctctctctctctctctctttctgtctctctctgtctctctctctctctgtctctctctgtctctctctctctctgtgtctctctctgtctctctgtctctgtctctgtctctgtctctctctctctctctctctctctctctctctctctctctgcttcagagatgatgcccaatcctcccttataaggacaccaatcccatccatgaggtgttaaatcatgagtcctcatgatttaactacttcctgaaggctccacctcatgatattatcaaatcgagtgttgagttcccaaataaaaatgttgatataccaaacagcaagcctagagtgctcagttgagccttcttccctcaagagggaactggatacacaaagccagagtcacaagctaaaaatgtcccttgaaatcactggatctagatactttaaaactgcatcagttttctactttgtcaccactgtactgtctttcaaatgcacttctggtgaaattgggtcattaaagatgcagatcttgctcacgtataaaatatcactctaagtatccaagacagacttagaaagcttggctgaatgcaacaagctcaggtatctattctttgtgctcagctgtctaaagcaatggatgaaacttagtttgtgggttctctatctgtctctctctgcctctctgtctctgtctctctgtctctgtctctctctgtatatgtagcaaatcctcctgctttagcctcctcagtgttagaacatatatatgtgtacacacacacacacacacacacatttctagacatgatccatcatgtctacattcctggcctatttgggctggtcttacctctcctgtcaagtcttgttttccatatactttgaaacagtggagaaaggtcacctctcccatacaccttcctagtctctctgccacacctttggttttccagaagcacctctgtcttgtacctaaattctacatggagttcaacctccgcacaacatggtatccccttgacttctgtttcttcttcaccttggctattttacctcctctagaactgtaagtgcttccagaggagaggctgtgaatattcatttccctgggaaatttccaacatgttgtgcacggttggtgctcagtaaaacctgacttcttgggcaccctccctgggcccttgtcagttctatgggaatgcattttcgctgggagtccctcagtactaaatggccatgtgtgcgttccactaacatgcgtcaagtgtctgtgcagatgctcctgccgagaggtcgtgtcagccctccagacctccttgtctttaaaacaaaagattatcatttcacataagcccactttgcgtgagcagaatgctgggtggaattccagccacacagagaatcaaaggagttccttgtgctggaagagaggcatctccacgcaaggatccttagagtttgtgaacagcgcactaatacaatgccaggaaggaacatagggacgatgtctacaaagtcaggccaacttctcacaatgtcaagactcccatttaacaagcctcatgaattcctacaagtaagaagatattatttcctctgtattagtgctggtccttgcttagacataataggaccacagtgatgttgctgtggaccacggtacccaaaggatggtctgtgtgctcattatgttgggaggggcgttacaatattcaggttctgagaccagcctcaggtctgcagagtcatggtggcttagaatacagctctggtgttgatatttccctaaagcctttctgattctgaccaacagctgggtttgatttcctgctgcctcagatccagcattggggtttaaggaggtaccgaaagcagcatttctctactgctgacttagcataggttttacccctccccccattttattctattggagttttccaaccaacagataaggttttcagaagcaaaccagaacaccttcacttgacagtaggtgactccaaggagatcattgggcctcaccccagggtacggcgttcagggtttcttaggtaaatatttactgagtgtggatggctctgaaggtgcagggtttcttttccggtgctggcattcatattccaggcacttcttgctcggtgacttgttttattctcatgccttggccaattacaagctgaggtagtgatcccagcgagagcatgggatgtaaatgggctgtaaaatggcttttcctggtgattatctgtgggagccttggagctagcatcaggctcagtctgtttggaggcttatgctgtgcactgcggctgcctgacatgaatggcccatggggaaggagccacacactgattgaaatgttggtgaacagctggcacacccgtgccctctgtgtagaaaaggcaagaatatttctttcttccttttgcatctccagctatgcttgactatggcggggacccacgatgaatgccttttcccttccctttcttttcctccagatgtcttagttgtcaatgcgaccttctcctttccgtcttggaacttatcagaaagattcaacttcaccaactgtgcgtcattaaaagagtaagattggctttgacttttaaatgttctcattgcttttaaatttatttgttttgctcctcgatttcctaaagaactcctttgcgaactagaactttccaaagtgccttttggagcatggcctaacgggagctaggagagccacggcggtaataaaccgtgctcactcgttcaagccctaacaagaaaactggagcagcctcagagagcatgcgccaaggtgtccctatcaacagggaaaggtattttccccagacctggaggatccctgaagaaaggatcagtaaggaataccactaactcccataatgcaaatggctctgggagtttggacagagcagtaagacttgcgaatgaggacaagttgaagtctccttcaccaaaaaggcatatccattttgctttctctctgtggtgctagggaactggacttgtgggccttgagcatgctaagcaagtctaccacttagtgaccccagccctgtgtcttccatttatttactattggccccaattcagctatggaccctttgaatttggactacagctccctcttggctcctaaagcagagaaaaggcagaggaaatagtctcttcagaggcccatcctctgcagctgggacagaggacactggtgggctgtattaccagaggtgtgttatccattctgggatgtgattggacatcagcataggagaacagcttccagcctggcccggaagtcactataggaaaaagtgaagtcagatggtgttaagttaccttttccaaagaggtgcattgcaaggccacagagagtcattgctgtctaagaagcagagcgaagttagggaagaaaaatagaactccaacccaggtaaaaggaagagagaatgaagtagaaattaggggtgcaaggacagtttaaagatgtcttgctgtagatcccctgctctagagcccaggtagaaggaaatgacataccccagggtcccaatgctaggtatataccagacctcagagccagatccaccagcctagagagctccttttcagggaactccttggggaacaggcttcctccctgatatgtagtctgttttctgccctcagggaacttctttctgtctgttaggatctccggagcatatatgaactccaggccaagtgtactccctctgtccggtttcctcatcacctcctgctaagttttcttgaggcatcccttggacagctctccagaccagccccgatctttcttctattaataatgtctctccctgatctccaatcattccttatgcatggagggcattctcaggctctccacagtcacccacgcacaaatgcctcctttgattctcaggtccaactcttcctttggttgtaaagcaaacagtggtgccccatcctctctgcctgccaggaaatgctttgtgtctcacaccgtgttgtgggcagcacagctgctccagacagcgcgggctctgctgatccgttgagtggcagccgggagagaaagatctcactttatggaggcttacctgagggtaggcaaatagcaaccaggttcagaatcggattcagtgggttcctgttatcaacagaccagcgggtgaccccagcttcaggtctccatggcaacacctctgtaagtgtgatgacaatccatcaactcacagggcttcccagagaaacacataaagccttgctcgcttctccaacctcaaaggaaatccttcctccctttgtccccctagctagtcaaagactttattattaatagtagtatcattcctgtatgttctcaacctgtagcgccaccgagggaagtttctagaatatgaataattccctcaaagtacagaaattaagttgtttattttccgtgtcaccagatgcccggcgtgtatcagaagcggctgtgcttggtgtaaacgggacaagaaatgcatccaccccttcaccccctgcgaaccatcagactatgagaggaatcaggtaaagtgacatttcgaaatatgacagagatctatcggaagcaagtgcctgcgtgcgcacagccccacccctttctgtgtgtcacactcccatgctgaggggatgttctccaatgcaggagctctgtcaagttgctgtggagaagtcgcccaaggactcaggaggaggaagagtcaaggagagcaagagaaacagaactgacggggctgtgcaggtcaggctcaactttggtgctggtaatggaaagacaatccccttttgatggcaataacaactcttactactttgggtttctgttgtaaaattccccatcttataacctcagtccctcctcccccacacacacttttttttttttagttcatttttaaaccaagtttcacataattggctcaatacatcaaaggctttcacattcacataagagaaattaaaactttgtaattgtgaaaaatgatgcggttccagtagaagtggaattgtaaaggtgactttgtggctcactggggaaagtacaacggacagctgagctgacctcagttccaaccagatactctgacttcactaatgaccagcactgtgtgtgtggttagggatctatgcaaaataagcaaactgaccttgcttattttttgatttgatttatggagttgattgaccccatcattaataacatcaagatagaacagctgaagaatatgtgcctccctcccttgtctcaaaagtggcggaggtttttttcccatgaaagtttcctggaaaattctcttgctttgtcttcacagttataattaccacagcctagatatcagtcatatacaaaaagatggtctgagaccatgtgaatatttccgcacaggacacatgtaactctgtttagttccgtactggctccctccagttgctagaagttcattaattgtttacatgtggtaacacacacacacacacacacacacacacacacacacacacacacacacacagagtggacaggttccctccctcattctctttcgactctgtcaaattaagatcagcactggaagaaattccaagggcccagctttctactctctgaccaggctggggctctgatttagccatttgctgctacttaaggtcaagtgtcaacaccaataaggagcacattttcaatcattactgaaaagttgatagtaactttaggtgaattaagtaacaggctgagggcctgtgaacccaaatggattataaagttaattaaagcattagtgaaccttggtgtgccaatatctccggcctttgagtctctgagacttaattaagtggtgggctgctcctctggtctccgtggtttgtaaaaaatgaagatgcagtgacaggagcttggatggagaagtgagaagcttggtggtggtggctttcagttttggtaaactgcagggaccatgagatttaccatcttcactatttttagtgtgcacttccgtaatgtaagtattccttcaccctgcatgtacagccagtcactgcaatacttttcatcgtgccagactgaaactcaatactcatttagtaactcctccccccgccccggccccgccctcatcccaccccggccccgccctcaccctgcccccagactcttgtaaacccctattctattctaacccctattctatcttcaccttgtgtgaggggtttgcctcttgtgacaggcttactttatcattgtgccctccaggctcactgtgttgtggcacggattagactttctttccttttgaaggctgaataatattccagcatatgtatagaacacattttatttatacattcccccaaccacaggctctcagtttgctttcaccatttaggcattaggacaagcccagttagaaacaccggcatacaactgactcttagagccaccctgtttagttcttttgctcaacaccacagagttaagactcctggatcacactgtaattctttttactaagtgccaccatcctgtcttgcacggtactctgtctagccaagggttctactaacagggttcaagggtttctgtctctcgaattctcacggaccttttcctgttttgtttggtttggtctggtcactactgtactcacagatgtgagcagcagcctcactgactttggttgtctgctccatgcgctttctgactccttttcatttgcttgttcactggctgaagtcctctgctaaactccttcccattgacttgactggttaacttgttttcttcctttgggcacaagaagtatattctagggattagccagatacaacatttgaaagtattcctctcctattctgttatctttcaactctgttgaatgtgtgtgtgtgtgtgtgtgtgtgtgtgtgagagagagagagagagagagagagagagagagagggagagagagagagagagagtatgagagagtatgtgtgtatgtctgatgtgtacatgtgtgtttaaatatgtatgtgtgtgtatatatatatatatatctgtatatgtataaatatatatatgtgtgtgtgtgtgtgtgtgtgcatgatcatatgtgtgtgttgcaacatcccaaacccacagcctcacacacaccagacaagtactctacattaagttatatccctgaactagtcatgttctttgatacatagaacttttaatttcagtgaagtccaatttgcctattttttttttctgttgtttcttgtgctttggggggcaggctcaggagatgactactaaaccctaatgttgtgaagcctttcaaacttccattttcctctttgagttttaactcatctgtgcacaccttgcccactggagtccgtttttgtagatagagtaaagtgaggttcagcagcccttcttctgcacatggatttccagcaccattccttgaacactctctccctgggtcagtggttatagcatcctcactgagaaccccatgggcttgcatgcaagtctttattcctgaggttcctccctgtcccagtgctctgagcacccgtcttcacatgagtactataccatctatgtttatactggttttttttttaagtctgtttttggaaccagtatcttccaagttctctcttgtcttcgattgtttcataagaaaacaacacgtaaaattttcactctgttttcctctgatagtaccacctatagctgaagattagccctgctaatgatgtcaaaggtcaaggtataggatgctcattaccacaggccaccccaggctgccattttatagctccatctactgtctcctgcccccaccagccctggagccccacaccactaacatgttctccatttctatagtctggtcgcttctaaaattttatgtaaatagaatcgtctggatgtcccctttgggagattagttttttttattaaatttgtttttatggatatataaaaacagaaattatacatattaatggggtaccatgtgatgcaattggatggaaattcagccgagttcttgtatagcagtctgggcagtgctttataaatatcttaaagagaagggtgacatagtcatagcaccctgacttcttgtaccttctaaactgtgatactgtggtttaaaaagtagcgtcaccaagaaagaaaggtaggtctcaaaagaagccaaggtttgccttcaacacttctctacagattgcccttctatgtttggagaaaggcatgttgctgagactgaaacattaactttacgtacgtgtgactcagagcagaatctcaagtttggttggtagggaatggtatgccacctggcacaggagagatttcctgtgctctctctgtgaaaggccactgtctttcattatcacatgaacatgaaactttctggtttgcacggttggttctcacgtcaagtttgtgtagtagacccaacagttgaggcagagaagccaccaagagcttttcttgaattcatctgcccacatcacctcagcaccaaatgcttcctgtgtgctgggcaccatctgaggctcagagatgctgagctagagtcagtgcttcctacaggaagcgctgaagcatctgctatatgatgtcatgctgaactccatggatactgcacgcaatatacaaatgagttaatcctctctcaggacatcagccctgagactcttttccatgagaacacccatagcagtacaagatttatataatacgtatatgtatgtataagcagaacctgaaagtacaaaaactcaaagccttgctatgcacagagtcttagctcttagtttttcttgtttatttaagcccagtacctgatggttaagcacaatcagtgtggttggttaagtctttgatggatgcattgatggaaaggacttttcagcttaccttagagggacaagaaatacctaggctcaacaagacagaggagtgaatattcttcatgaagcaactgccataaataagtgtagtcatggccggaaaatccaggagacctcagtagttcagtttgtcttggcagcagaggcaggggacaaatgatagcatagaagggtgaacaagctggagcctgtgtgtgctgggatgtatacctttggggatttttgtcttgcttcttcagtggcaatgcaaagcttttcactacatctattttagtatcaatttgatcatctgagaatgtggtgctcaaaagggaggactcctggttcaatcccaggacagtcggcttcacattctcatgatcctaagacttacttgatccaggatactgtggtggtttgaatatgcttggcccatgggaagtggcactaccttgttagagtaggtgtggccttgttgggagaagtgtgtcactgtgtaggcggactttgagggcttctagtgctcaagccccaaccagtgtggaagagacagtctcctcctgcttgacttcagatcaggatgtagaactctcagccccctttccagcaccatgtctgcctggacactgccatacttcccaccatgatgataatgaactgaacctctaaaagtgtaagccagccccctttcattgttgtcctttataaaagttgccttggtcatggtgtctcttcacagcaatggaaaccctaagacagataccctgatccaggaacaccagccctaatttgtcaggagactgaagcaaagaaaagcataggcccagtaaagaagccccagatttcatctggcctagaacgagggcagccatctgctgtaagaccaatcttgatctctgctttcctgaagccatgagacggcaagttctgtcatctgactgggtgaccatctttcctttcattccctaaccgtctttcatctggtgcccttacccaatgagggaagctgtagctgccctcctgcccacagggaaggctgtaatgatatgtggtgaattgtagatgttgtctggttatggttttttgttttgttggttggctggttaggtttttttttgttgttgttgttgttgattttggtttgggggggtatttgttttgtttttgttttattcaagacagtgtctcattatgtagctctggctgtcactgtgtagactaggaactcaatatgtaagtaaagtggcctcagactcagagatccaactgcttctgcctccagagtgctgggactaaagagatgaaccaccatgcttggcctctttggccatactcataattcctcgcaatatgtttatcactatagggaggaaatcaaccatgtcaagctatgtctctgcttccctccatgacttttcaatgtgtgctttaatttctcatatagacagtaccaaatggaccctttcaagaaccttgccttcagaaggaaaattaaatttaacacagacttttgttggtttgtttatgagtagcttctatgggcctagcactgttctgcattgagttcattcacaggatatttgttgagcagcaattgtgtgtgtgttgggcaggcacaatacagacccacatggagtttgcactgtcaaacttagaatgttttggaatgaggaagtgagattcttcgttataaaaagagtcaaacactcataacgggaatagaagccaaaaagaatgtcagcgtggactgagttgactagtggcagctaatctttatcagacccttgccatatcctgaactcagtgtctgttaatctaagcttcacaatgccacattttacaggcatggaagttttacctcaaaaccaaaatgtagataagaaatttgaacccaggtatctggatagagaattttcagttttaactaccaccctaccttaaatgacctaaactgaataagtgttaagccacataatattattgctaaaaccctctctggaagggaggaaactcttaaagataatgcaggcttttctcaggattagactataacagtctgtcccatctgtgcgtcaggcagacgggagcttattctcatgggagacggggagggagaggggcatctcagggtgagggctatgagaaagaatgagccccaggatgggccaggatggccaaaacaagagtgagtcaacaaaaatccagtgttcaaactgagtcttgggagaaggtgtgttagaagcagggttaagaactatgttctctggtctcagcatcctgatccttcaggcctgatctgaggggctacattcaggatgaatggccaagagtaagttagggggtagccttggcagctccaccatgggttgtgtcagcctcatcttagagttagtccccaggtcacagaagcaagtcttaatctctcagaagagagcatggatctctgaaagtttcccacctaagtcctgaggccctgatgacctttggcagttcccagttccctgttccatcccaagttctcttttgctgtactgggactcctatgaagggctatctccttaggggactgagcatcaaatacatcgtgaggtgttcattgaactctcccattattctttgatgggattgtattctgctcttttctttccatatcacattcccttttacactttcccgtctccacggctggtcaccacaccgctcactttgtacatatgattaatatattacatctgtcctcttctcggccattaatgaagatgttaaataattctaagccaaatactcacccccgtggggccccacaggacactttcgtttaattagttgtattacctttcatctctctcatgtcctttgacttcagatgtcctgctgattttgaagccatgtgacttttcatcctgtcctgtttgaactaatttcatgagtgaaaatctgagagatgttttaccaagtgttgacttgggtccagacctacagagagcttcactatgttctgattttttttcccctaacagattaatagagtatagtttgttcttaataaactgagccttcttaatggacctctttccaatagtcttttctctaaaaatgtcatggcaatttgagttatgttggtgtcagacgtcacgcaaggtgagccgtagttaggatttctattgctgcaatacaatactaaagtgactaaaagcaagctgaggaagaaagggcttatttggcctacacttccaggacactgttagtcattgaaggaagtcaggacagtaactcaagcagggcactccactacctggcggcaaaagctgatgcagagggcatgaaggggtgctgcttactggcttgctcctcatggcttgctcaacctgctttcttacagatgccaggaccaccagcccagggattgcatgacccaccatgggctgggtgctcccccatcaatcgctagttaagaaaacgctctacagctggatcttatttaggcagtttctaaattgaggttccctcctgtcaggtaattctagcgtgtgtcaagttgacataagaccagcaagtacaagttgcttgtgccttcagagttgatcctctcagacgttttcaaggagaactgttacaggtggttatacactttccaatatcttataacggcttagttttttgaaaaaaagaaaagaaaagaaaaataaacaggcatcctgcaaactgcctgattaagtactttccaatatgctatcctaatacaaacaaatgagaaacaccccccccctctctctctctctctctctttctctctttaaacaaaatagttaaaatttaccatcacttaaaaataacccctgtctctaaagtggaactcccaggaagtggacagttcagaggttaatgggtagaaggtgttgggccaggatggttacagtcagtgatgtctagatttgatgcaggggaaccttggatatggaaagaaggaagaccctcactataggggtgaggaggcctggctgtatccagcccagttatggtttttagcttgaagggttggctacatcatgtcaggttgtaaattaactttaaattaaagtatcaaataacatctaaagtatggagggcagaaaacattatgggaaagattgttctctggtcctttgtattcattttattttttaaaaagttaacaaatattaaagaaaaaaaaccttttaatgaatcctcatatccatgacgtacagctatgtagctgtgctatcctaaattgtatattttcacagtggggtcatgccactgattgctctttagcctcctaactctgagattaaaaaaaaactctcctggaaaataaaagagctgatgcgaccctctttggaagcaaactgcaggcacctacttccataagaagccaggcctagactcggtcctccatgggcaatgtaaactcctctaaacaataagattgtcaaacgaaatgcttttgaggttgcaaggctcaaggggaaataggaagttaaaaggatatcagcctccgatggtgtttctagagcccttaaaagagcaaaatgcacctacctttgaaacaacaacttttttctttactagttacaaggctctcttatcttgtactatgaacaagaagtagcatgttcaaaagcatgctatcctgttttactatggcagacaactacagtataagtacaagaagcaccgagaaaaagacttggcttcagaggacaaataatggacagtttacaatagcggagaggtatgaccagggagcatcgctcagcgggcagcacacggggatgagcacagaagttacaggccctgaattccgatcccctaaacctagggaaagccaaacacaggaaaagccaagggcaatagcatgtatctgtaactctagcattcctaaggtgagatgggaggcaatgcaacttgtactggctggtcttatgtcaacttggcatatgctagaattatctgatggagagaacctcaatttagtcccatgagtatgtgaagcatcaaacaaggtgtaaggtaaggaccaataccctaggcagttttctgacctctaacatacacatacacacaaacatatatatatacacacacaaacatatatatatacacacacatacacacacacacacacacatatatatatatacacaaacatacacacatatacacacaacatacacacatatacacacaaacatacacacatatacacacaaacatatacacacaaacatacacacatatacacacaaatatatacatacaaacacacacatatatacacacacaaacatacacacatatacatacacaacatatacatacagacaacatacaagcgtgagtgcacaagtttaaaaaaaatttaaacacacacatatcttgcttctctaataagacagtgtgctctcttgtagagcaggggatacagatttttctctacaacagtggttctaaatcttcctagtgccgtggccctttaatatgttccttatgtggtggtgacactcaaacataaaattatttccattgctaccacataactgtaatttgctgctgtgatgaattgtaatgtaaatagttgtgttttctgagggtcttaagcgacctctgtgaaagggtcctttgtcctccaatggggttgtgacccacaggttcaggacttccatactgcaaagaacctggcagtgtgttttgaggctgtgccagctacacagtctctgttgtaattagctagagataatacacatacttctggataatgacatgtgacatgtgctgttatatgtttgaaattctattctccttttgacatttttttccataggacatccaaaaacagcagacaggatttgaccctgggtctgaagtttcctagcccttgatctgccccccaccacataccatgcctacctttacctagcagctgctggtctagtgatcagtaagtacttgatcacttggctgtcacctacaaagctaaacagcaagtcttcttataacacacacttgacatttgcaagggatttatcttgaagtcgttgctaatccccatcccaagtaccactctaggagataattccaacaccaccccccataaaatgcagtcaagtataacagaataattaaagtgaccctttcaggcacgtagtggttcaataaataaatacagggctaacgttctttttaaggtgattaaaataaagtccaccacaggaatcaattccctgatgcattacatcatcaccacgatgacattaataatggatttatcagaatctgcaaaatcaatccacggtgataatgagtagtggctgctctgccaaatagcccctgggtttgtcaggagagcagggtgagaggttgctcctaccaggcggatggtcagcgtggcagccgaccacattctgtcacccggaccagcaggagatgggcaggcgcgagacatcacagaagctggaccagtgactcagtgtcctcctgatagacgtcatccaacaagcagctgatctctacatttgtgctttggcccagtgtggcatgatgaggcttctctgaactcttaggccactttcaaatgggaagagtgtgactgtggagtctctgtatgctaagacctgccatgctttatgtcagccagagtcttggaatggagagaatctacaaaagaacctccatgatcagaatggacgatggtagcacttggggaagaggtgcacaaggcacctgggttgtttttgtcttgcaaggggggaaacgagagcccgaagggatggctcagtggttaagaataattctcgctcttgcagaggatccagtccaagttcaaatctctgcactaatgtcagatgtgtcacaacagcctgtcattttaattccggacaacaccttcctctggcccctgaagcagctgctcacacatgcatctaaattaaaataaacctttagaagagaagggagatgattcctgcctcctctaggatttgtaggggaaactgattagatcttgcaaatagaggagaagctcagagagatggcctgagtgctagggaagttaggtagcatgtaactccacaggactcagttttgattatagcccagagaaagcgagagactgggtcacagaggttacacgaatgttcacaatgcctaacttttccatacgggagtggctcaacattcttaagacaccctgtcctccgcattgaaacaaacaaacaaaaaatatggactccttcctagagaattaaattcctctgtattgacatttgtattgacggaacaatgagtccgtgtgagcctccgctggggagaccacttcccttcccttccctgggcttgagcatcatgggcctcaggagagggaaaggcagggggctctttctcaactcgaatgacagctcacgcctcagatggaatatccgggctcttcaactgtgttttcaactgtcttgtgagacaaagactaattggtttgaccccatgctgtcacatgttgagagacacgaatcttcagccctcttccttgaattcattgatttcattaaatgctgtctgcttgtgtttgcaaaatgtaatttcctagtgagttcttcgaaccgcaacacatcaacagatttcgtgaaagtgtgtgtgtgtgtgtgtgtgtgtgtgtgtgtgtgtgtgtgtgtgtgtggacacatgtgcacacacgagagagagagagagagagagagagagagagagagagagagagagagagagaaacagtgccattttgtagctttgatctgctgttttaatctcttatttccaataggtcttctacattaaggccattgagccacaaaaaatatcaaccttagggaaaagcaatgtgattgttactggagcaaacttcacccaggcgtcaaatatcaccatgatcctgcgaggaaccagtacctgcgagagggatgtgtaagttgaagcactaacaaccgatctttggtaaagttagaaacctacgctaaagcagtgttagtaggccttggtgctttctgtagtcaaatggcatttaagtattttatacatcaaaattatagtaagtaaattataataagtaaaatctttaatgattcatttgacattcaggtgggagactctggcctgtgttacatcctcagtcaaaaccagtttcaggatgttgccagtgggagccttgattggcttttaaagcagagtcaagtgtatgtagaaaggaactaacttagaattatagacatgaactttggaaacggatggatggagagcgtgctacctgaagttgaaaaggaaaaatggaagtagaaatgttgttcactgtagctttcttctctcgactggcttggttttcatttcaaataattaaattactagggcatataatagtagttaaaaaaaacccacccccaaacaaatatcagatgaagtaccccttaaagataatgatacctgtggttctttttatcctagcaatgaaaaacatatccagtgtttgttcattaatattcttaggtgaatgataacaccttcccaggggggataatactaacattatgtaataataacaccgtgacagataactttagttttctgcttgttgactcttataagtttgggttaatttgaagtttaaaagaaaatgtttcagtctatatgaaccataatactgagctaattctcctcatggaaatgcatttaagacagtctgctgaagcgtgatgttttggttttttaactaccaaaacagacttgtacagtgctgtaatctgccatgcctatttagtgaactttctgttttaattcactggctgcacatcgctgcatcccacctccacttactgcagtaaatctgggatacccatgatctcgatgggggaaagatacccatcagtggctttcctctataccagagtgaatcaacacacattaaagcctgtatctatgcaacctgggttgcttatgtgcaccatttatcctggctaaataccttatagcaaagatctttcattttgtgtggtgaaatctgtgacgttagacacctgtgcgctcaatgaagggcaatcagcttcgctgcaaaataagtcgtttttggagcattaccctgtttctggctctttatgctctcatttccattctgaatgtgtcttgagaagccacagttattaaattaaatgactaagagctctttctgcatggagcattctactaaccacatctgcatggtgaacccaggttcacaagcaggcaacgtaataacgcagttaatcttgtacccgaatccatggtgaaatcccaaaccctgttcatggaaactttgtaagtgaatggctattttttttttaagagaaaaagacaagcctagtagcagaatgatctatatccccacccctcaccttccaaagtgtataagcacatttgtgttttaatgatttgagcatggacttcctagagcttctctttagaagccttaaagatatacatctggggcaggacacatgcaaacagactccagtacctttcaaattcactttcttgtaaggtgtggtgacggtactagggttaacaaccacacacagaatatcccttcagtagtaaaaccagacccttctgtagcctcattaagctgagcaggtggcaaatacaacttgatctaaatgtgtgctttagagactcatagacattagagtcgctgatagtttcagaggggatgtcacagacggctttgatttgattgatgagggccatcaggagtgtataggacagtcccagccaatccctggtctggaagtccctgaggggcaccagccttgtgtcctttgattctaagacgtcagggttcctgaagcaggttcccctctctttgaaggggagaattcccaggtccgtttgggggagggggggggtcatactttcctgtgcttgattaaaactgcttcttcttcttcttaaaaaaaagcttttaattatggaaatgacagctcatatataagaaagatgcatataaataaggctctttataaacttaaaagttttggacattctcccaattttatttcatctttttctattgcttctccccccttcatgcccccctcccccatggaggcggcaggggcagaagacatacactgtggctggagtgtcttccaatcaaatcctggtgccacgttgtttcgtggacccgtcaatgtgtctctgacagagtagtgccaatgttaaccttaatttcttcatttagtgtgatgcccctccttgccctggtccattaggacctctgagggcaaaggaagctgcttcttcattttccccttctaagggggaatgcggatcagagagagagacacacagaagaaagaggaacccagccttagagagccagacccaacaggcggcccttgactagtccgcctctcgaaactgttcttgaccatcttcgagtgcaattcatgggtcgtcaccttgagcaatcaactgtgctaagtgtctgtgtcatgtaagagttcctttcatgacccctttctaggatccgggttagccatgtgctaaatgacacgcatatgaaattctcacttccatcaagccgcaaagaaatgaaagacgtttgcatccagtttgacggtgggacctgctcgtctgcaggggctctgtcctacattgctctgccacattgttccctgatagttcctgccaccacctggatcaggtactgtctggatccacagagggcttctcttcttccggtgaagggtgatgtacataagatcatggcgatggtagttgcacctaaattttcctcttggtgttcctcctaggaattatttctagaaaactgctcctgtctgaccacaaggactgtgagcatagcctgtttttatttcaccatggctactaggaaactcacagctcaaacgttttgttcaaccacaatgactgttcttagcccaggttgctgtggccttctgtgtcacctgccttccccattcgtgatgtaagactccccactcacaggtttcacttgctaacttttagactcagctgctttgaatgctttgggggaaatactggagcctgcgtggagcctctacatttcaaaggtcctgtttgagggttaaaaaactccaaaataaactctttgagatgaatacaatatattaatggggaaaaatgtctctctctagtcaaatttaaattcacatttaggttctggtgtataaccccaacgagattttcttcatctcacacgaagttaacttttcacgtacctttcgagataaaaccacagacaaagcaatgagggaaaataaattggaaggaaaaagagacaaaacatctcctgtactcttacttgagatgaccttgggaagcagctgggtttgctcaactgtgataatagaagtcagaccggacagcttagacagccgaaatgggagttcctccaggttgtacgtctccgaggtgggaggaagtttagccccttgcaaggcagcgtcttgcagagttttcaggcagctgtctctcccctgtccctccatctaagactgtgccctaagctttttcagaatgccatcagtcactccagtgaatgccctgaatttccattacctctttaatgaccttaatctcaggtatggtttagtggtaaaatactgcctagcatttgcctattccccacctccacccccaatctctctatcttcagccttcttctgagtcagggcttccccatgcaaactttgcagcccattggagtggcatagggaagactgagatttcaaaagcaaggctcttacctgcaaccctccgctctgagattaagtatgccctatgtataagtagtaacccggatgtggcactcaccacatagtcatggtatagctgctgacctggttaaaccttacaaaaactctgagaacccaacggtgggttgtccctttggcaggggtgaaccaaggcacggctgcagttcaagcaatatacgtagctccctgagagctgggcccaggatgcgtggtttctaccacaatactctgcttcctcctcatcaaatggctgcctgtcaccatgattgtgctgagcccctgagtctcagtgctcctcatccttgagcaagaaggaggaggtgccaccatctggaatcaggagaagatgtttgggttggttttcttaaaattgaggcagattgtcaagtggccatacagtgtctggggtggacctgccaccccagaacaagtgtctggtgacccatgagaataaccagagctgtaggcagctgtttctttcacactgggtgaccactccgatgttatctggtgacaccttgagactaggtgaaatcactgtttggttttggtgagatttgtgtaccttccccgtacactgaaatcccatatcttaaacaagaatacaaacttctaaggtcactcgccattttagcttgtccacctatcgtgtgttccctgtttccctctaaataaataaactataaataaaatataattggtgggttagagggtttggtcgtggaaattgtgagagcgggtcatcttctcatagattaaactgtaatcaaatgagatttttgtcccgtgaaatgcttccaaggtacagcagatgatctggttatgtgtggcgaaagaccacaagaaagctccgattctattaaagaatttgggcactttcccagaactgaaacggggctgacctgtatttttttatatgtatgtcttagaaaccatgagtctgcagccagtaccatttaaagacttctaaaattatcaacgtcttttaaattgaaattggttccttgtctcccaaatatgaccgagcttaacattaattgtgaatcagttaatagtttagtttgaaatcgtgaacgccggtggctcacccttgcccttcgatcccttgcagcggtgggcaaaacataaccatcatgggcagaaattttgacgtcatcgacaacctcatcatttcacacgagctgaagggaaacgcaaatgtgaacataaatgtaagttatactaaactggggggggggggggctggaggaagggtatgtttcatttctacgacttcggcattataaacttttgctttcatgtgatctatactgtctctgctgtgacggaaagatctcattcttggagttatttggggttgccgcatagaggaaccagaaaagaatttcatgtgttaagacctgccacgttctcctcgtgcgacgcatgtagcacgttgctttaatcagataacacttctgaataggtgtgaaagtcgttgtggatggttggggtgctatgtacagagcctgtgacaagtatgtggtccaacagcaccaagggaggtcggggacctgctgaagtaacattccttctcttgtcattgtctcttggtcctgtggccactgtcttccgcccctcccccactatgcttccccatccccagactgtgggaattgtctggtccccctaagggtttagttctctgagaagagccttgacgttctcacaggaaccttcagggtgaagccatgggtgtctgtgaggaggggctaggtacactgttgcttatataggtgcttcttgaatgttcttccgtttccttcctccttttctctagtgtaaagggaacagccattctgggcctcaacctgaccacttcctgccaaagccagcagtgctgagggtggccaaacactttgtcctacttgcaaccagtaggtgttcacgcctggaaacgagtgtagcgatccatctttcttacggccttgtcctagacacatgcccatccacttctggcacacttcctggccagttcccagcctcacactgagtctgattctggccattttcccgtgatggaagcctgttcagttgtgtagtggcccttggcctgagggacagcctgagccaggagacctggaaacacggtctctttcccagaacatgtcccatttattgagcacctactatatgcaaaaccatttttttttctggctgcaagaacaaagagtaaatgagcttctgcccccacaacacccaaccccaccttcatgaagggagatggcagacctgcactggcattggacactggcagcatcgttggtgacaagtgccgggtcctcccgctccttccatctctcatgagtccaagaagccatgatgtgtttcccagggaaagcatgagtgggtagggctgagactaagctaatggagttcagtggaaaagactagaccagcaagcaggtaaggaagcagggagttgattgcagagcacagaagagggtattcacctattctagacctattctagactaaaacaccactcacgtttgctttgttggaaccttagaggctgggttgggatgggtgatagagatggctgaataccatacagggccacgcaagggagaatcatcccccaatacggctctacatttccgagacagctccccatcacccctggctctgtaggcaatgggggcaggaaggtcttgggggtctttggcaaggagtggcatgagggtcattttatccacggtgcctaaggtagtttggagaggatagttaatgaggatgcttcaggcatggctgggacaggtctaagtgtgactgagacaccaccagatagatgcctgtggagctctctgctggaatgccatctgcagggtaggtctagagggctggtgatggtgaggctagccatttcagcatccctgtggatggagatgggggtggggggtggctgtgtagaagagaaagcaccaaggatgaagaaagcatgtctagaatctgctcgaagcttttcttcaggggtgagggtgggagagtcaaagaaaatagaatgaccagagacggtcaccgagaagctgtctttaaaataagggttgctccccacacaaacaggctcagtcttaggggtaaggagcgagggagaccctgttgctggtttttcttttaggacgttggtgttaaggaagtaggtattgtggtccagtgggttttcaccctatcgcagaagtgctaaggcaggaatttcagaatgtgttcaggataaagaatggtgttcttactccaatgtggccacctagatcctctgtccacccatccttagctccaaggttacagaaaacaaagagagggaatgctgctcccagcttgcttgagtattaatcccttctccctcccagtctctctcccttcctctttatcttacaatgttaaggaccgaacccagggccgtgagcatactagggaagccctctgccactgagccccagccccggcacaccctcccttaagtatctgccaacctgtccttacattgtctgcaaggtttccctgcctgtctcgctgcgcccttgaacatggccgtgtagttatgggttttctttgtaaataaacctgttcacaaattgggtcaggctttctgcctccgtcccgtttgcacacccctcatgtcttaggggacctgttgctgttcttaagcttgtcattttctgctctttactgttgtgcctgaaaagctgcttcctcttgcggtggttagggacttctcagagggaacctctgccgtagcttccccaacttagggactctcttgctaaccttctgcagaggctcttttgacacacagtgactcaaccaggtaccaagttagaagctggcctcagctctcaactcccttcctaaagtttccgggactcagccatgcagacttgaaaggtacctgagagctttgagccaagccttcccctttcccagcctgcttctctttgcagagccaccctgtgctccccatgccatcacccgacaggttctctgaatgccagttgtgtcagtgatgctctgcatagaggatgctcgcatgtgcagaatacttcctgtgtgcccgtcagaccctaagtactttacagatataatctcattcacagtggccaacatttaattgaatgaattttttttttttaatctctgctcatttcatttagggttaattcaatcctatgagatccatagtgttgctggcctggttttatagaggggaagaacaggcgttccgcagaagtttggttgcctgggtcacttagcatttagagctggggtcctccggtacctgataggctctttcctgtctccaggtctctgaatactgcgcagcaactttctgcaggtttctagctcctaatttaaagagctccaaagtacgtacaaacgtggccgtgaagctgagggtccaagacacctacttggactgtggaacgctgcaatacctcgaggaccccagatttacagggtaccgagtggagtcagagattgatacagaattggaagtaaaaattcaaaaagaaaatgacaatttcaacatttccaaggatgacattgatattactctcttccatggggaaaataaacaatttaattgcagttttgaaaatattactagaaaccaggatctcacaaccatcctttgcaagatcaagagtatcaagaatgcaaacaccatcgctagctcctctaaaaaagtccgcgtaagtcacctgattgccccgcctgctgtctttatctgagtctccgtaattgccttactaacccccaggttggagtggaatctctcacagatctttagattcttctctttaaatagaagaagatcgacaaagctgatactgcaagcccaagcataattccaaccagaatagcaggcagagccatgcctgtgcttgttggaacggcaaagcaccgaacacaccattgtctataatcctaatgagccttgatagcttttgttctagctgtgcatttataccatagcatctgcaagccacatctccagatccactgatgactgagctgtcactctctctctctctctctctctgaacgcagaggtgacatgtctaagcagaaacccaaaacaccagcctcttaggcacaagcagggcgggcagcacaagcctctgtcggcagcccaataatctagggtttgagagtggcgtccgccagcctggctgtctttttctgcagcaggtcaccgtttcctagatgtgcccaaggatcctctgagaagagaaacatacagggtagtgtttactctgtccagcgtaagcggctctgtaaagtctattaaaaaaaataataatactctgcgagtcaggggacgcggctcagtggtagagtgcttgcctgtggtgcccaaggctccaggcttaatctccagcattataagaaaaagaagagcaaccattttctttgtagtaaaaaataattggctaaaagacaagagagaacatttgtactgggaggcagaagtgagagtgtgcttgagtcccagctgtggctctaggtaggacatctggcttcgcccccccccccccccgaccctttcattgtttatcattttggcaagagaggtagtaagtagccatcacgaaatgagcaaccccaggaacctgctcgaggtgctagctgggtgtggcacatccaggcatccttccatttgctgcaaagttcccaagcacccgcactgggattcaaacccggcagagcagaaagcaggcagaaacagctgccttgctggagagtcccagtgagggcatgcagtgaggaataatctttagggaggactatacgaagggggaggagaaagtagactacctagggatgtctttgcacctgatggtggaaaagtttgcctggagaggcgacattggaatgtgggcctccgggaggaggagaaggaagagaaggagccacggacagacagagggaagcacaggctccgagtgtcctgaggcagaaacctgccggctaggtctggcctgaatggggtgggtcagcatggttggagtgaggggccattcccaggaggttagagagttgatggggagggccagagattattagggcctttaaggcattgctagaggcctgtgcttttgattctaggcagctgctagagagagaatgagaacagagatggtgtgagctgccgtcctataggagagagaccgttggcctttacctacccataggccctttcaacatccatgtcagagatgacagaatgaggctgggtgcagactaacttaagatcctgcaaggaaagaaaagctggactaagacctgccatcaccgcaaccatctcgcttggtgcttccatggggctcaggttcatggggcagctcaggttccagggagccgcaggtgccttggcacttgtgtgtgtgaagatgaagaagggacagatgtagcatttttcttccttttcaagtttaattgccaagtttttcttagcccctgaccttcaacctcccccctctccccaaaaggcagaaaacagaaacgaccttcagggatcatctggtggtcagctttgccaaactaattttcacctgagaaagtgacagtcaaaaccttcctgactggaagcatcagtgtaggagaaagcgaagtgtaattgcacctgtagagaacggctaggagccttctgcctcagtgtgagcccaccgctgcactagtaaggttcaggacaaagagggctagtatttaaaacccacaggtctagtccggcacacctagagatcccacccgccccaccacgtctacatctcggggaagctgacagcgcgcatgcgtatggtgcctggcgccactgggtctaacagtaccaatctgtcccatcaggtcaagctgggaaacctggaactctatgtggaacaggaatcagttccttccacgtggtattttctaatcgcgcttccaatcttgctggccattgtcatcgttggtaagtggcccgttccattttgcccgagacgttattccccaaggcttctccgtgggcaggtagaccttcagcttttgggaactctctgtttccattaaatattaatggatgaaaggccaagccagagagttgagaagtgaataacaggtggtctgtggcttctctaatgagtttttacggtgcttcactaacaaagagcgagattgcaagatggtcccttgatgtttgagaagtattgcgcagataccccacgtctttgggattgttttggaaacaagtccattaaggactcccagaacgtggtcatcctatctcatccttggcttctccccaccccctgccctgcttttcctgggaaagtcaggctttgcacgtgtgtctatgttatctattccaacatgccctgcttcctatggacatggaagtaccatactgactaccagtgggcaaatctgacctatttcttggatcctacggtaccgttttggtttggttttgttttaactgaagaagttgacatctaaaaattaggtaactcaccctttaaattcgtgttgaggggggccagagagatgactcaccagtgaagagatgctcttccagaggtcttgagttcagttcccagcagccagatggttccccacatctgcagtgaatctgattttctcctctgctgtacatgaagagagagtgctcgtatatgttaaataaatacatcctgtagtctgtatggacagtgtgaaaggtctaaactctaaggtcccagttttagcttgcattcgttgttagagcttggcaattgctactccttgaagacagggtgttcgccctctgggttttcaccatagtctctccatcccctaaggtctccacccacctctatagctggtgcctgcagctattttatgtccttttcattctttttcttcttcttctttatcaacagcacaccatgtttgttgattaactacaacatggcccctttctgacactgtagggcatggaggcaagggtcggcattgctgtgctgtgtgtcttcgcacccccttcttactctcgtttccaaatctgttttccttgtttcttcgtttgtttttttactgagcattggataagatgtgggtgactgggtctgtccctactttgagagttgacttaaggactagtgctttctttgggcagttgacactcctgggacgggagatatacatttgtgaagaattggctccatgaaatgaattttcctatgttgcctcatcggtgattatttggggtatttttttatgctttccccaagttgtctacctccgtcatatatctacaatttaaaatttgacttgacattttcataaattcctggctgatatgggcttcaagaagattgcttgtataaatgctgagctctgatttgagtatcaactgctgtcagacgtgttcagatctctcagcctcgccacatagtcatgtccactttgtgactcccgagaaacctctggtctcttgttaactttgtaagaagtcattttgtcctttaaggtgatttgtttgaatctgcaggacctctcaaaaccatcccgttgtgactcattctagggaggcatgtgtcacggcagctatggtaaatgtgacctagtccttcactcatgtccttagtgtaaatgctagatgcacctagcctgagcctgccaacaacagagccaggaaaccaaccctgctgtgtggatgctgcagctccctttacattctgagtcagggtagcttcctggggagccactgccccaaatgaaaaaaaaggggttctctggttgggtgagtttgaaaatcagctcttggaaatgctcagtcccggttattgtaagtacagctgagatggtgaaaaagtctagggatgacttctgtgtaattgtgttgaacagtgtttgttttctctctgtgtctatgtctctgtctgtctgtctgtctgtctgtctgtgtctctctctctctctctgtgtgtgtgtgtgtggtgacatacataggggtgcccaaataccataggactcgtataacagaggaaaaatttgtctgtgtgtgtgttgtgcccgaataccactgcagacatggaactggcagaggataacttcatgttgctgctcttcaccttccaccttgtttgagacagtgtttcttgtctgtaccctgcatacactggggtagctagccttaggattcctggggcatctcttgtctccgcctcccatcttgctgtgggtgtgtctggctttacgtgggtccctcagatcctcctatttggatggcaaacacttttcccccaaccccttttgtgtagtatctgttaaaagttgagatccttctgggatcatatgagagctggcaatcgtttgttcctcgggtcgatgtgattccttgatttactgcctgtaatctcttctacatcacagctcttatggataaggcaggcaggcaggcacagagatgctaagggatttgctcagggtcacacaggtagtaaatgaaacgacagagcggagatataaacccaagctccaggattcgttgcactgactactcaaacagcatggttcagagcaaggtgatgtggacacagaggccaccagctatgggggctctccatgacttgcctgttacatcaccccttcttaaacggtgcaagttaggctcctgctgcgaggagggatctgcagcaaggacacatctgtgttttccttcggtatttgcaacgctgtttcgtttctccagatatgattagagatgtggggaaaagaatgaaccatccacaaatccagtggctggcttcagggaaaaacttggcctgcttccttactttccagccagctgggacctttggttccaagtgaaggttatttgattgtgttttcactttaagatgagtggaattttttccccctgttacatttaacaccttcctctttagaatgacctttaatgggggagctggagagatggctcagcagttaagagcactgactgctcttctgaaggtcctgagttcaaatcccagcaaccacatggtggctcacaaccatctgtaatgagatctgactccctcttctggtgcatttgaagacagctacagtgtacttatgtataataataactaaatctttttttaaaaaaatgacctttatggaaatggccctttaataagaatccagcttttgtttttttttcattttgttttttgtggcattgaggttggaacccaatctcaatggaacatgctaggtcagtgctctgacaccacacagaccccccccccccataaagtttttacatgctcttttctatgcataattctccctctatctctcctccctgtttctctccccccacccccacccccacccccattttcatttctgtgttactgcaccaacctgacccagagtctctgtcccctcagtggctgtggtggtgacgaggtacaaatccaaggagctcagtcgaaagcagagccaacagctggagctgctggagagcgaactccggaaggagatccgcgacggtaggctctgagactccgcgtgcgcgtagcaaaacaagccctgctcacttttattttaatttttgcccttatgtggaaactgccacataatgagaactgattgtgtagtagaagacaagctgagcagcagggcctgggcctgggcctggctttgtgttctatttcggctcttctctgcagccaaccaagtaattatctattgtttcttctttaatgaaaaccaaggtcacactctgtgttagacaaaacagcagaggatcttatccattgtttgcagagttaaaatattgctcttgggattctgtgttgcaggctttgccgagctccagatggataagttggatgtggttgatagctttggaacagtacccttccttgactacaaacatttcgctctgagaactttcttccctgaggtaaaagaacactgatcatcatcctcaggctgagccttgaataataatgcgacatcttgccttaagtccgggccgagcagggaagaggataattattaattgcattgattagggtagagggcagcaacaggctactggcaattactctttccctggtaaggagtacaagtttagagtgatgggttttgccatatatatatatatatatatattttactaccagcttcaaactgactccgtagctgggaagtgagctaattcattttaaaatcaataaattgtgggctcgccaatttgttgtgtttatctgcctgacttgcactgctgctcctagattattcgctattatttctccattggaaacgaaaggcaggatcagccaaatgggggagaaattggacacgcagggaatctgagttgatggcaggcagttttagccacgtgaagggtttatggtctcttctttgacagtttttctgttagtagatcactttgcttgttcaatagatataggtgtctggaatgagatgtgagtggttctagcgcttcaagtgtacagagagccctttgggttggggtgggtctcaattctgttctgacacccccatttcctcacacattcttcagttaccttcccccccacccccaccccaagcctttgacaagaacactcacccattctgtctcaccacgctatacctcagctctgccatattgctctgctggtctcagagagatgccctctgaattagagctcattagtccctcccatattcagatctgggccagtcagcaaagttagaaatctcttcaaaccttgactgtttttggccagaagcctaagaacataggcacatgtggttggcaatttctagtgtctctacaagtcttgcaatggatatatatatatatatatacatgtatatatatattaatcatatatataaatatatatttatcatatacacacacacatataatacctacacacatgcacacacatagcactgtcgggacagctagacattgccacaagatacctgccatatatggggatccaagccttggtgttataaatcaagaaggctacaaataagaccagtattcttacttatcctccaagaataccaggcaccaagacctgctgcctgctgcctcatccatttgccgtacttgggggaaggagggaaattcaagtccctgagtcacggtaatactcaggacctctgagaagcttgcatctcgagccccagtttccccgttctctgagattccccattaagaatttaaaagcaataaaggagatttccagcatccagatgagtactgtgtgggcttttacagttaatgattgcccttgaatgctgaatagcataatctgcggcctgaaaaggaaattctcctatcttctaaagtcagcagtcaagggcagggcggactgatgagtgtcaaggaacaccattgcgagccgagtgcctcaagatgaaaggaagcccccagaatagcgtggcattatcttgggagaagagaatagtcgcaaggagcccaaccgatttaactcagggttcagtgtggtgctgaatggcaaacagagagtcctaaagccaggagtcattaagacagaggacccaagtggaaaccaacagggatctttcagaactctttgaaggagatctaagtcaaaactgagtttatactaataagaagtggggtgaagcccaagaccaggctgcttgctatggttgaccagagccagatccttgggcctggagcttggatgtctgagaggccatgatggatgatcagttcttccaagacagcaaaggaagaggtggccagggtgtggcggctccagctttgctcacctgcctgctggttttgttttaaagctttctttttcattagagcagtggttctcggccttcctcgtactgtggcccttttaatacagttcttcatgttgtgctgacccccaaccacaaaattatgtttgttgctatgcctgtaaccaattttgctactgtgatgaaccttgatgaaatacttgatatgcaggatatctgatgtgcaacccccgtgaaaggattgttcgacccccatgaaggggccttgacccacagcatgcgaatcgctgcatggtgtatatgtgttattgttgtctgagatagggccccagatggcacaggctgacctcaagtttccaatgtcataaagaagaaccctgaacttctggtctcctatagatagactgatttctgttttcctgaaaatagaaaacacaggataagcagaatatctaatctcttggaggaaggaaatttgaatgaggaggagaagttttgagccagggagcaagggtatcatcacttcccagcagaaggtcaagaatgaattgtggggtcttaagagggctcaggggtaaaggtgcttgccacagtaagagttcaatctccaggacccaaaagttgtcctcacacacacacacaccacactgagacatggcccttccctcccctgtaaataaatgtaatcacacacacacacacacacacacacaaaactgtttaaactggacatttatatgaagttaaggagtagaccaaaataatttgagatcttctgctttggctaacaaatttgaaaccgtgaaatgaggttctctgcaggaaaaatttactttattaagacacaagctttatccagagtttaaagtatgaggggggggggagaggagagaggagagagaaatctgtttgatgttatgattttacttagttaattcaaactattacccagtatggttttatattataatctttgggcatagtccatgttagtaatttcagactttgggagacagagaccagagaattgctgggaatttggggccagcttgggatataaagtgaggtcctgtctcaaaaacacccaaaataagtaaatagaataaaatgcaattcttaatttcggtaagattaatgagacattaaaaaaaaaccctcaaaatgaaaagtttatatttaggatccacatagcatagtatatcaagacgtattttttcgagtagggataaaaccctcagtcatagtggacacagagcactgtgtgctcagggctcccgcatttcatttttacaagaagcctgtgaggtgggaaccattgcctccctccatttcacagatgaaggaagtcggacacagaggttaaataacccatgcatgctcgtgtggccagtacatggtaagccagagctgggcccctggtagtttggctctaaattccatgcttatgcatcacatgttctgccattgcttgaggatgtaacatagtaggacagtagatgctacctggctataccacatctaagcatggcggactgtgtgagcctcatgcttagagggtagcgctgtgtgagcctcacccttggaggtcagcactgtgtgagcctcacacccttggaggtcagtttcatgatgagaggtctgacgtttctgtaatcttccaccaccattttgttttgttttgtttttaacttttgagtcagttctcttttaaaaacccaacataatctaccaaaaagccagtctttgccaacgacaattctcagaggcttccagaggccacgggtgttttttgagagcatggcaattatttattatgtcttagaggtgacacagcaagcgtagaccaagggctcttcagattagcaaatagcacccctgctttattagaatggacttgggtattgtaacaaaaatgcactgttcatttccttttggatgttatgaataataaaagtgtctccttcctctcagtcaggtggcttcacgcacatcttcactgaagatatgcacgtaagtctctccgtcttcactttgtgctcagtgactgtctgtcagcttatcatccttactgtcaccaccattgttaatactttgaatttttattgtgggcatatttggatattaagtaacctgttgtcttgggagacccattgtggctctgctttctaagtttccacttacgtatggtcctgagctatattatcatactgttacatcattgttgtttactcttcacctcctccagaacagagacgccaatgacaagaacgagagcctcacagccttggatgccctcatatgtaataaaagcttcctggttaccgtcatccataccctggagaagcagaagaacttctcagtaaaggacaggtacctgttagttcctttgtattttgataagcacttagacagagacgtgaaaacctaagcacccaccgggtatgatggcacacgcctttaatggtagcatgctggaggccaaacaagtagagctttgtgagtttttgagaccggccaggtctatgtaacaaattataggccagctagggacaagcaacaaccccaagctacttattttagctttgtttttcccccttatttatttatttatttattcattcattcattcattcattcattcattcacttcacatcctgatcatagcctgccccctcctaatcccctcctcgtacagtccttccctatcttcctctccttctcctctgagaagagggagggccctccctggatacctctggcacaccaagtcactgcagcactaggcacatcctctctcactgaggtcagacaaggtggacccgttagaggatcaggatccacaggcaggcaacagagtcagggacagcccctgctacagtcattgggggacctgtatgaagtccaagctgcacatgtgcaatggtagtagtgtcggggactggctgttgttctgcttgcagacagagcccagcatggctgtcctctgagaggctccatccagtagctaaccaaaacagatgcagagacatatgtacagggggcctaggtccaccccgtgtatgctctttggttggtaattccatctctgggaactcctaagggcccaggttagttggctctgttggtattctctgggtattcctatcccctccaggtcccccaatccttacccaggctcttccacaagatttcctgagcctcacttgatgtttggctgtgggtctctgcatctgttttggttagctactggatggagcctctcagaggacagccatgctgggctcttgtctgcaagctgaacaagaaccaatccctgacactggtaccattgctttagtttttgaagggctgggtatcgaactcagggcctcagggatgctgagcaggtgcttcgcactgagctacagacccagctctcaagctccttgctcttaaacctctccctgcgcctcagcaggccctgtcccagcggagttgacagggggtttatacagccatgctttgtgcaactcggatcacaccaacagaacccagttctgtcttgaaggcacacatacatacacatatcacccagtaaaacctgacaaaaaccccaacaccaaaaaagaaaattcttaaccaaaaaagcagaagtgttatttttaattttgaattttaaagaaataccctaaattttttggaaaagaaactcacttcttgttgggaaaaaaaatagaaaatgacttgtttggtttgtttgtttgttatttcatgtacccagcaggctggcctaaaactccctttgtagctgacatgaccttgagttcccgattctcttgcctctccctccatactgctgagatgacaactgtttgccaccacagcccatatatgcccttctagggatcaaaaccagcgccccatggactaggcaagcagtttaccaactgagctatgtgggtgcttacgcctggtgggtaatcttatgccataagaactgaacggatcggaacctaaacaacacacaaaaaaatggctcctcaggagacaattcccccattgccagcaagatttcacggaaatcagacaagtcctcctgagtccagggctaacggctcaccaggctctatttttaaacaggtgtctcttcgcctccttcctaaccattgctctgcaaaccaaactggtctacctgaccagcatcctggaggtgctgaccagggacctgatggagcagtgcagtaatatgcaaccaaagctgatgctgaggcgcacggagtctgtggtggagaagctcctgacgaactggatgtctgtctgtctctccggtttcctccgggtaagtgtcacagggctctgcagtgtcagaggtaagacaataggcaattatttttagcccacactggtgtctttgtggagctaagtccagaatgctctgtgcagtcagcgtttaattgaacttgatcgtgggtcttccagattgaatggaaaataacaattgtgcgggtcttgtttgtttattttctttgtttgttgctgctgttagtagtccctagggtacatataattcacgtagggctctcttgggtaagattcttatatgcgagctcatcttcttatcttagttaacacccttgattctgctagcctatgtaggaaaacgtcccgagacctgagactgtttaaaacgctgatgagcacaaactgttcttgagtcctttaaaacatgttggaaatactcattactcactggcacactggcagctaatgacggtcccttcttcccaggtgttcagcagtaaagcaaatccccaaagagccttctgtcctccgagttcactttcttgaagtgactatggcatatggttgaatttcattgaaccttcaaatctttcagagtccaaactttctatgagcattggagcccagggctgggtctggagttaagacggctccatcgcttcttggcatgttacctgtggagttaacaaaagatgaatatcattgggctgttttgaagcccagatgagcaggagtacaccatttgctcggcactgagtaagaaccccataaatattggccattattataaaatattaaaatgaaaatcagggtgtttctgttgaacatggtctttgttcatcgctctgaggccctgggatggagggaggttcttatccatctttaacttcaccagccgtccagattccagcaaaacggcataattgtgtatttgcagcttgcttcaaaatctaattaaaccctgaataagatacactgctatgccacaggttttaacagggctgcttaagctgagatccacaagcagcactttaaattagactgtgcctagtttaatgtttaatgcaatcttaagagtagatacgcaacatttaaaaaaaatttttttaactgacttttcccactcccaaggcaatggccgtttattaagattaatgaaatctgcctccttttctgtttacttggtatatatcatctgctctggggatgtgtcaagtggttatttctggagagagctgcctttgggcctccctgaggctgggtgggtggccactgctgaacacaggtgctagaccctctcccaggttcccaggtcttaatcctcagctgaccctaagccaaaagccctagaatggcatccaccagtctcttctctaaaaactctgtggctaatgtgtacaatgctcagaggaaacagaaagcaaacacgcaccctgaggttttgtttaaaaccagtaagcttgcttgctatctgcgtccattccccagcgccccaacccacccagctgcctgagtcccccgggttagcgtgttcactgtggacactgtatcattttgttgcttgtgtgtttctggcttggtgtccattcactggtaagtctactggtttgaaattcactcccagctcttccctaccaggaactcgcaggagctgcttttaggcatgaaaggggagaagtgttcagaaaaatctgggctccaagcccaagcggcccccttgagcaaagcattctgggtcaagatttcttctctgtgctgattcaagagtgtgtggaacactcggtggtgaggggggagagcggcacggtgcccaagaggaagtggcagccagccagtcctgggcgggactttcactttcagtggaagaatccctccagttatcaaggggcttggggggcctcctcttgccctgctcattgatgctaagcaggtagcaaccttcaggtgagctcccttcccagactccaaggcctggtagggacagatatgacagttgacatctattaagcactgctgttggctatacatcagacatcaggccaagagcttggattatcttttctcatttaacccttaatggtctgcagaggtaagtacatttatggctgttttgcctatgggggctcaagacagacagaatagatgtgattctgtaggtccgagggtagcgaggatggtgccagcctctgaatgagctgatagtcagctctggtctgtcatctaaagagagaagacatgtcccccaacagatgagacatacaattccttgtgttagttgacgacaaagaaatcttgtggcctggtggtttcctaggctagtcagtgtctctagaaaggtttttcaacctgcctctgctaccgaaatctaggttgagtaggtatctatgtggcacagggtaggggacaggcacctaagttcttagggagatccttaaaagatgctggaggtgactcgatagggctagaactgagggcccgaggggcagtgtgaagccatatgtcaccagctccatttggggaatgctggaaaatcctaactagagagcccttgagccagtggctgttcctctgcccagccctgggggtcctggctggcctctgcgtcaaccaatgtggccaacccagtccccacacaagggcccttggtgtgtctctgccatgtgtaagaaaggcagaagtgaggttcttaggtttgtggtcaggccctttcccaagggggtggacggaaagcagatctcggtgagataatgaaccatgaaataaaggaagtttcgtatgagaacgaaatgtcaggtactggtcccccttgccccaccttggaaacttctgaacatccccctctctgtcccgcatcaggaagaggctactcgctactgtcccgcatcaggaagaggctactcgctacttggggagttgtcagcagaggggagagaagcaaagagaggcagggaggaagtggaccaggagaggtagagggtggcaggagaccaagggagggacctgtgcttggaggaagtacaaaggcagagacaggggtgagcggagaggttaggggaggccccaaagggttgtcggtaaccctcctgttcacaggaaatcagacagagagccagagggatgctcctttcgaagctgaattagttagctctgcagatgaacttggtaacatgggggctccaattggagccatgtaactactgtttcatctttactaaggcactctggcttgggaggagccctcccctttcccccaccaggcctagtgtccatggatcctggaaacctcattgtttagggggaaccgaaactgccccagggctgcatgcctcagccgatggcaggaagcagaacacagcctatacctgaactacccaatgtccctttgaacatagtggcttcaaatctgggccatcaaaaccccctcccccaattcagtgggacgtgttcacaggagagggctggagacagggaccctgggaccagccttagaggttcagggaagggaatactgcccatctgacctgtgaaccgtgcaagaggtgtctgaatgataagggccaagggctggcacatgggcaggacaacagctgaagtggaggccacctccatcgctaaaagcagttgaacactgacaggccaccctccacagcaaatgtttaaaacattcttgcatgagtccctgttgccaagactaagtgtgaagcacttttttttttcttaatgtcgcttatttttggtttgcaattaaacgggcacgtaaacaaggttataactctacctccgtgaactgctcttaggcaccagcctactgatgagcacaagcctgccagacaggaacttaaacatgaaattaaggggggcctctactggatacctcccatagtgttgggggtggggtggggctcgtgcatgtgcatagtgtgcaagaaggagtttcctgggtgatgtgctgcgcgtttccacgggctttgcatgttgattatgagtgaatactgctgcctgtcactcgtggtactaccgtgggcttcagagctaactgttgcttttgcaactttttccaaggagactgttggagagccattctatttgctggtgacgaccctgaaccagaaaataaacaagggtcccgtggacgtgatcacctgcaaagcgctgtacaccctgaacgaagactggctactctggcaggtccccgaattcaacactgtggtaagcttgcccaaagcgctccatccagacccagagggtgggggtaggtgggatggggggagggtgggtcctcctgactgtgggaggccccggggcatccacataattgaaagcagtagttgataaaatattaacacgtgttcgcataatagattttaattccttgggttggggagggaagcgccgtgacgatgcctgggatactcgtcaatttccaaaggttttaatatcgggattgcttatagctttgaacatcgtcaaaggaaatgcaaactgctccctattcggcacttataattgcaatcagaatttctcaaatggctctgcttggggaagacaatgtgtgaagagatatttcaacccaaattgaggccgtcttattttagaccgataacacaagacaaacttctctgtgttccccatgcaacacgacgccttcctttattatttccatggattggttacaaatgtttgctgtcacgcacttaatgtactgtgatctcatagatatttttagaggaatgctgtagatcgctccagcagggtgacggggctaggctgcctgagagtttcaaatactgagagcttccttttaacccattctggcgccagccgccctcaatcacccccagagaaggagacagtacttcggggcctttcaggagttttgtggcagaagccccacatggaacatgtcttccatacggctcaggagctttcgaagcttttccatcatcgtcaacttgaggaaaggctctgtagctttggtttgacttttagctctatgaagactctagacttctttaccatcttattagtggacatggaagaagtagattccagtgggattcaggaattgctcactggagagctcaggctcctgtggctttgctctgggtggtgagtcctgtggtatcattctagaagaattcactccctaattgaagaaggcaccactgtgctatggaccgtattatggttatgtcatggctgtgggtgaggaggagccaggagatcagctgtttccagtttctttcatctgtgtgtagcatccccatggctgtgtgctcagcagagcatggttcctgtggataactgtcagcacctgtggggtagggcagtgttctcaggctttagcatggtggcactgtggcccggacagtgttaaacacccattgttaggtgaccctagatgcaagtctggggtatgacttagggtttgcatttctttcaatttactctttacaacatttatttatttttatttgatgtatataagtatctgcctgtatgtatgagttgccatgcgggtgctgagaactgaacttaggtcctctacaagagaagccagtgctcttaaccactgagccatttctccagcccagatttatttatttttaattacttgtatgtgtgtgtgtgtgtatgcacacgaatgtaagtatatatttgagaacagaggtatcatattactccaaagatggttgtatgtaacccaacaagagtgctaggaactgaatttgggtcctcttcgagaacaatgcatgcccttaaccactgagccctccagccttaggatgtgcatggttaatattctcctcaggcactacttgagaactgttggcatgggggttaggaacctgggttctggagccaggcaggtttgaaccttgcctctcccactggctagctgtgtgacactgctcgagtctcttcacttgctatgccttctcagtctccctgacgataaagatgataatcatgacggcccatctcttggggatgtgataaagattaaaagagtatccagcacacaggcacacgcatgcatctgtgcatgcacattgtcttagttagggttttactgctgtgaacagacaccatgaccaaggcaagtcttataaaaaaaacaacaacatttaattggggctggcttacaggttcagaggttcagtccattatcatcaaggtaggatcatggcagcatccaggcaggcatggtgtaggcagagctgagagttctatgtcttcatccaaaggctgctagtggaagactgacttccaggcaactaggatgagagtcttaagcccacacccacagtgacacacctattccaaccaggccacacctccagatagtgccactccctggtccgaaaatatacaaaccatcacacgcatatacacacagacatgcatgcccacatacagaggaacatagtcacgtggggatcctcagtttcttctctactgtctcctttctctccttatggtctttcctgctgctcatccaccaagcccaaagcagtacgtggcccccagcagtgtcagcaccgtgcctctggctttctagaactgtgaagtcagtcagtcccttccctatacaaatcacccagcttcgggtgaggccagtgtttgggtctaacaagagaaggcagccctcacaggggtcttagggataaaggttcctaagtaaacgtaggtttggggaatccagcaagatttcttttcatgaaacacattgcatcagaccaggaagagaagaaaggaggtgggctggggggaaggggagggagaagtcagctgcccgaaacaacttttgaggttacggcgttccagcgctttctgtctgaggactttctctccctttcatttggaagcgttatttatttcacagtcaattaggaccatgtgtttctgatttgttaggactcaactcatcgtcaaaatgttacttgatgttgaagaaattcgtgtcgactcttgaattttttcccctgttatagcctctgggggaaatgcaatggaaaattaaatctctgcactgttctcctctgattcatctgcggtggatagagtggaggctggcagagaggtgggccctagctcctaaggcctttgcctttaagaatgattttttttttaaactgtcttttgttggacctgctccaacctctctttcatggtggctgattaaactagaagctagagagaaggcacatgatccagtcagtctaagcttgtgtgaccaaaaaaaaaaaaaatgttaccgagggtcaatatgaaaaatttaagcattttcatttcctttcatataagttctcccaacctgaaccaccctgtttctaagtttcccccttcttcccttcctcccccctcccttttctccacttcccttccccccaccctcccaggctacactcctggtggtttgcaaagccttgctacatttgcctgaggtggtttatgtcattgaagactaaggtgttgtgaacatactggagagtgtgtgtgtgtccctgttctaacaagggacattagaaagctctacaagagtcacaggagcaacttgaaatagaagaatgtggtgccatggcgggccccattggagaaaaagcccgttgggatgcatgctcagaaacagcgcctcacacaacaaactctgagttaggtttcacacctcctaggttagaatgttttctctctgaggtgtagggtgttttctagaacatagagatgcactgccagtttcttgtatttaaaacccttatactaccaaatcgctctggaaagtcagatgtccttcagcccatcttgagaggataatgcctgagttgccttcacaaagcccttcataaccaccctggctccagtaccaggtgccccagaccggcatctggcaagtcgaatggtgccaatctctattcactctctgatgcttaaggggagattgtgtcaatcttcatacgacaccctagacttcctttaatgtgtgaggagatggccctaaagggaaaatgcttgctatacaggcacgatgacctgagttcaaatctccagtacccatgttgaaattagtcatggtggcacacctgtaatcccggtgctagggatggaaactttcctctagccccgggttcagtaaaggacactatttccaaaaataaggtggacacttgatccagaaagacttcatgctggcaggatagctaggctggtaaaggtgcttgctgccaacctgagttcagtccttgggagccacatggtagaaggacagggcctgtccctgaaaatcagcctctgctctcctcatgcacacttaaattaatacataaatgtaatttaagttcagagtcacctacagctgcgtggcaagttccaggctagtctagattacatgagatcctgattgaaagaaaaacagaagagaagactgaccactaacctctgaccttcatacacaccataccctcacatgtgtgacacccatgcatacaccattcaagagttcagagttgacagtcaaaagcgggagcaaaacctattgatcctctgttttctccacagcaaaactgagagcttgctaaatagtgtttctggggagtgcctggccctggcccaccctcctgtatgtcaggaacatgtttgcagagcagagggcctgcatcttggaggatttcagttccaggaaagtataccacatgggagaagggacatttgcctcagtttcaagaggagatgagaaaaaccaataactcgtaacaggcgtgctgaattagcaggagaagtttgacttgtaatcaaagttaagcgagaaatggttttttgaactcttaaacccaggaaatgagcttgccaatctgctgcatcggagagatagcatcttggcaccctgggaaacagagttccgacaaacacattattacactcgttctcatatctgtacgaaagtctttaagattattagaaattcttgacaaagcccagggacatgcctgcagaaatgctaatgcgtctgttgtgattcatggaaggtttatgccggtcgctaccaagtcaccctgctccccggtggctgccgtttggggacaggcatgtttagggcaacattctatctctaacacaacactggctagccctagcaggaatttctgtgtgttctccttacctctctcaaacccctttggttccatttagcttgtccttgcagaagatccattatccccgtaattaaacaacccactgtcccgattaagccgttctctgttacttcaattacatcccattgttcattaagtcctgatgtttgcacttcagcaatcttgtttttaatactcctagcatttgtggagaaacagtgaagttaattaacaattcttaagctcttttttttttctttctaccatagtgcaaatcatttccattatgacttgagataatactgaaaccattactagcttcatagttagcttcctgatcaaagagtgaaaccatttttcataatcgtgttaggtaagtcattccctggtcgatggcaagctgtggaaaatgaaaaattaactttaaatgagcgctttcagtgccgttcctcttcgtggtctttctcttcacgcctatcgtcttggaattagagaaataatttagttatctcagtacaaaagtatttaattttcatctctgtggttcaaattaattattctttcattatttataccttttacaaatcagttgctttgactacagccatagcactctgaacacgttccatttcatctgctctcggaaggtaaacagaggcaggcccccgtgactatttgaatgggagagtggtattgcaaaggtttgtctttttgccgttgtcattttccatttggtgatatatatagcaggaatcatcagtcaacagcctggggacaaatgagacccctggactgtttttatgaataaagctttattggaacactactccgtgtattcatttctgtattatgtctggctggctctttactaacaatggcagaaagtgttaacttgtcgcaccaaagaccatataaacctcaaagccttaaatattttctgcctgatcctcaatagataatttgtcagctcttaaactgacacttgaaggcgggggtgggggaggaatctagaatcttctctctaatctgaaagtgcttggcaaagtgttctcactgttcacaaatctttgctagctctgttctctccattctaggacgtgcaaacatgctaagtatagagaaactggtcacagaaacaaagtggggccaatgcctttctcaccttgtcttgttcagaggacaaaggctttcttccacacttctctgcccactgtaattctgtgagaggagcagactccctagctgggagctgttgtctatccttgatgcgacaggagagggggctggacatggtaggaggcgggtgagcatgggttagggagacagttgaaggcagggaaggcttgtgcagggctgaggggacaactgttgaaaccgcttggaccgctggctatactgagcaagctgcagcctttctgagtttggtacatgaaagagactttcctcttgactttcatttggccctgaaatgaaattagaaatatattttatagcttttattgaatgagaacaattattgctcaaagaccatttatgacaaagttgctggtttgtaaaaaaaaaaaaaaattcctttataggaattatagggtatgtcagcaaggatgtggctgcatccagcccttgttagccacagatatgtcagagaagctaagcaggtgacattatagacctcccctgggacagggttctccccatattcagtttatcccaagaagcctcagttttttgtttcctctatacctcaagctggagagaaccactagccaagtaagaatgtgtagttattcacccatgtgctgtggggctagggtcaaagacatgggatttaggctctgagagtcctaggtatgaaattggtcttggtccattactgtgtgactttgggcaggtcaccacccatcagcctatttattcatctatgaatagttggtgataaaagcctaaccttgtaggtttttgtaggtaacctttctgacttgtgctaaagtcagaaaattatgtgtgtaacacacctactgcctttcctggcacagaggaagtggtcattctttgtgacagtgtttttcttatcacctttaaggtacactaaagggaggtctctcctgtggtccttctagttgtttttttattgatgataggtgaggtaggggaaccaggttagctagctctgtcatcatgataaacacatctgaaattcccatgtgttgtgttagctctgtaccaggttacacatgcttcctgtgtttgggcacggacaaccaaatggcagagaataccctgataggcagggcaggagttgacagtggtaaacctgaacaactgtctaaaagccgctgccttggggtatgctgggaaaaaaacagccattttcatccagtcctctcctatgcactgtgagtctccagatggccttgcctgcctgatggcttccttctgtatatagctattaggaagcagtacagctgtgtagaacagaggtccagatgcccaagtccaagcagcagaaagatggatttctccccagtgtgaagggccggaatgggcagccctgctctgggatgcctgcaggtaacttcttggaatgagctgtctgcttcctcagcctctttccaattgccacagcaggacctcagcaggactacacaagaaaggacagatggtcagcagctgtcttgcaagaacctttcccaggggttgccacataacacatccatttaaagtcattggccagaatgcggtcacgtggccacacccagcagcggggacagggcagtgcccagaggctccggaagctatacacagtaatgctgatcaacgtgtgcttccagaagatgcacagagcacagtttggtactaagccagagtcagaaggtcaagccccctctagtacctggtgtgtgcccacccatcgtctactgatggagaactccgcaaggagaacaccattcctagcctcctggcatttcagtgggagtctggacatagtcaagtgtgacccttccagaagctgtaatctggga
